(19) United States
(12) Patent Application Publication
(10) Pub. No.: US 2024/0101983 A1
(43) Pub. Date: Mar. 28, 2024

(54) PROGRAMMABLE RNA EDITING PLATFORM

(71) Applicant: NANYANG TECHNOLOGICAL UNIVERSITY, Singapore (SG)

(72) Inventors: Meng How TAN, Singapore (SG); Yuanming WANG, Singapore (SG); Kaiwen Ivy LIU, Singapore (SG); Kean Hean OOI, Singapore (SG)

(21) Appl. No.: 17/769,047

(22) PCT Filed: Oct. 19, 2020
(86) PCT No.: PCT/SG2020/050599

§ 371 Date: Apr. 14, 2022

(30) Foreign Application Priority Data
Oct. 18, 2019 (SG) 10201909733W

(51) Int. Cl. C12N 9/22; C12N 9/78

(52) U.S. Cl. CPC C12N 9/22; C12N 9/78; C07K 2319/00; C12N 2310/20

(57) ABSTRACT

The present invention relates to artificially designed polypeptides having RNA-targeting and editing activity, wherein said polypeptides are fusion proteins comprising a modified ADAR2 deaminase domain and a Cas family targeting moiety selected from deactivated Cas13b and CasRx. Further encompassed are methods for use and uses of these polypeptides, compositions comprising them and nucleic acids encoding them as well as methods for the manufacture of said polypeptides.

### CROSS-REFERENCE TO RELATED APPLICATIONS

[0001] This application claims the benefit of priority of Singapore Patent Application No. 10201909733W filed 18 Oct. 2019, the content of which being hereby incorporated by reference in its entirety for all purposes.

### FIELD OF THE INVENTION

[0002] The present invention lies in the technical field of RNA editing and specifically relates to artificially designed polypeptides having RNA-targeting and editing activity. Further encompassed are methods for use and uses of these polypeptides, compositions comprising them and nucleic acids encoding them as well as methods for the manufacture of said polypeptides.

### BACKGROUND OF THE INVENTION

[0003] Technologies that alter genetic information in the cell are valuable for multiple biomedical and biotechnological applications. Traditionally, the focus has been on introducing changes in the DNA and recent years have witnessed the rapid development of a wide array of genome engineering tools. In particular, CRISPR-associated nucleases such as Cas9 and Cas12a have been successfully used to manipulate the genome of many different living organisms. Furthermore, by fusing a natural or evolved deaminase domain to catalytically impaired Cas9, various groups have demonstrated that some types of point mutations can be efficiently corrected via base editing without the need for a double-stranded break.

[0004] Lately, there has been a growing interest in targeting RNA instead of DNA. When changes are introduced into RNA, they are transient and reversible as cells are continuously making new transcripts. Consequently, modifying the transcriptome offers at least two important advantages over editing the genome. First, RNA editing can be used to treat temporary conditions, such as pain or inflammation. It may also be used to stimulate tissue regeneration after injury. Second, RNA editing avoids the problems of permanent gene editing. Importantly, any potential off-target editing will not be fixed and propagated.

[0005] To achieve targeted RNA editing, researchers leverage on known RNA deaminases, specifically the ADAR and APOBEC family of enzymes. ADAR (adenosine deaminase acting on RNA type 2) enzymes convert adenosine (A) to inosine (1), which are recognized by cellular machineries as guanosines (G), whereas APOBEC (apolipoprotein B mRNA editing enzyme, catalytic polypeptide-like) enzymes convert cytidine (C) to uridine (U). Most efforts to date have focused on the use of ADARs to introduce A-to-G changes in selected RNA transcripts. Since ADARs are double-stranded RNA (dsRNA)-binding proteins, a stem structure containing the target site must be created, in order for the site to be edited. Furthermore, all the published strategies can be broadly separated into two categories. In the first category, endogenous ADARs already within the cell are recruited to the target site for it to be edited. The recruitment can be accomplished using long (greater than 100 nucleotides) or heavily chemically modified antisense oligonucleotides. In the second category, an engineered ADAR enzyme or its catalytic domain is ectopically expressed in the cell, with the modification designed to enable the deaminase to be recruited to a desired target site. This modification includes fusing ADAR to a λN peptide (Montiel-Gonzalez et al. (2013), Proc Natl Acad Sci USA 110, 18285-18290, doi:10.1073/pnas.1306243110 (2013), a SNAP tag (Vogel, P. et al. (2018) Nat Methods 15, 535-538, doi:10.1038/s41592-018-0017-z; Schneider et al. (2014) Nucleic acids research 42, e87, doi:10.1093/nar/gku272), a RNA-binding protein with a well-characterized substrate such as MS2 (Katrekar, D. et al. (2019) Nat Methods 16, 239-242, doi:10.1038/s41592-019-0323-0), or an inactive CRISPR-associated nuclease from the Cas13 family (Cox, D. B. T. et al. (2017) Science 358, 1019-1027, doi:10.1126/science.aaq0180).

[0006] Existing technologies for targeted RNA editing in mammalian cells have various problems. For example, one could have high on-target efficiency but has poor specificity, while another could have good specificity but bad on-target efficiency. More specifically, methods that rely on endogenous ADAR have various problems. First, their performance cannot be controlled as it is dependent on the expression level of the endogenous ADARs, which can be highly context-dependent. Second, endogenous ADAR also subjected to intracellular regulation in unexpected ways. For example, in muscle cells, endogenous ADAR protein level is very low due to degradation by high levels of AIMP2. Third, in the LEAPER method (Qu, L. et al. (2019) Nat Biotechnol 37, 1059-1069, doi:10.1038/s41587-019-0178-z), the guide RNAs used (called arRNAs) have to be longer than 100 base pairs, which has the potential to activate the innate immune response (e.g. via MDA5). Also, LEAPER suffers from a big trade-off between on-target efficiency and off-targeting editing. Fourth, in the RESTORE method (Merkle, T. et al. (2019) Nat Biotechnol 37, 133-138, doi:10.1038/s41587-019-0013-6), the guide RNA used to recruit endogenous ADARs has to contain extensive chemical modifications. Hence, this method is unlikely to be useful to most researchers. Fifth, there are many RNA species in the cell that are highly structured. These methods only rely on base pairing between an exogenously introduced guide RNA and a target (with no additional protein introduced). Consequently, it is unclear how well they will work for highly structured targets.

[0007] Due to the limitations above, the ideal situation is still to introduce an exogenous ADAR deaminase that can be readily programmed to target a specific site. The best system reported to date is the REPAIR (RNA Editing for Programmable A to I Replacement) platform, which relies on an inactive Cas13b (deactivated Cas13b or dCas13b) fused to human ADAR2 at the C-terminus (Cox et al., supra). Cas13 is a programmable single-effector RNA-guided ribonuclease belonging to the Type IV CRIPSR-Cas system. However, REPAIR suffers from a trade-off between efficiency and specificity. There is thus still need in the art to expand upon the original REPAIR concept and develop a technology that is both highly efficient and highly specific.

### SUMMARY OF THE INVENTION

[0008] The inventors of the present invention found that the activity of the deaminase domain (dd) of RNA Adenosine Deaminase 2 (ADAR2) can be tuned towards less off-target activity while retaining high on-target activity by introducing mutations that replace positively charged amino acid residues in the ADAR2 protein that may increase “stickiness” towards generic RNA by other residues. Off-target activity could be further lowered by replacing the Cas13b scaffold by CasRx, including CasRx variants such as CasRx K942L. Additionally, the design of the guide RNA for the dCasRx (deactivated CRISPR-associated Rx) ADAR2dd fusion could be further optimized with respect to length and sequence. Fusion of ADAR2 to certain internal sites in CasRx/Cas13b resulted in similar on-target efficiencies but even lower off-target editing than the original C-terminus fusion construct. Off-target activity could further be lowered by splitting the CasRx domain and rearranging the fragments. Certain cis off-targets could be eliminated by modifying the gRNA such that guanosines were put opposite adenosines that were wrongly edited.

[0009] Based on the above findings, in a first aspect, the present invention thus relates to an isolated polypeptide comprising or consisting of
[0010] (1) a first polypeptide domain comprising an amino acid sequence that
   [0011] (i) shares at least 70, preferably at least 80, more preferably at least 90%, most preferably at least 95% sequence identity with the amino acid sequence set forth in SEQ ID NO:1 over its entire length; and
   [0012] (ii) comprises the amino acid substitution 173Q using the positional numbering of SEQ ID NO:1; and, optionally,
   [0013] (iii) comprises amino acid substitutions at any one or more of the positions corresponding to positions 145, 33, 34, 36, 139, 140, 142, 143, 154, 155, 156, 158, 159, 160, 162, and 164 of SEQ ID NO:1 (hADAR2dd);
[0014] (2) a second polypeptide domain comprising an amino acid sequence that shares at least 70, preferably at least 80, more preferably at least 90%, most preferably at least 95% sequence identity with
   [0015] (i) the amino acid sequence set forth in SEQ ID NO:2 over its entire length (dCasRx) and comprises the amino acid substitutions 239A, 244A, 858A, and 863A using the positional numbering of SEQ ID NO:2; or
   [0016] (ii) the amino acid sequence set forth in SEQ ID NO:3 over its entire length (dCas13b) and comprises the amino acid substitutions 133A and 1058A, using the positional numbering of SEQ ID NO:3;
      wherein the first polypeptide domain is fused to the second polypeptide domain or inserted into the second polypeptide domain;
      with the proviso that if the second polypeptide domain comprises an amino acid sequence that shares at least 70, preferably at least 80, more preferably at least 90%, most preferably at least 95% sequence identity with the amino acid sequence set forth in SEQ ID NO:3 and comprises the amino acid substitutions 133A and 1058A, using the positional numbering of SEQ ID NO:3, the first polypeptide domain does not have the amino acid sequence of SEQ ID NO:1 with the amino acid substitution 1730 in combination with one of 33E, 36L, 140G/S/E, 158D, 159E, 1600, and 162E.

[0017] In a second aspect, the present invention relates to an isolated polypeptide comprising or consisting of
[0018] (1) a fragment of a first polypeptide domain, wherein said first polypeptide domain has an amino acid sequence that
   [0019] (i) shares at least 70, preferably at least 80, more preferably at least 90%, most preferably at least 95% sequence identity with the amino acid sequence set forth in SEQ ID NO:1 over its entire length; and
   [0020] (ii) comprises the amino acid substitution 173Q using the positional numbering of SEQ ID NO:1; and, optionally,
   [0021] (iii) comprises amino acid substitutions at any one or more of the positions corresponding to positions 33, 34, 36, 139, 140, 142, 143, 145, 154, 155, 156, 158, 159, 160, 162, and 164 of SEQ ID NO:1;
   [0022] wherein
   [0023] (a) said fragment is a C-terminal fragment of 230-239 amino acids in length and comprises at least 230 amino acids corresponding to positions 156 to 385 of SEQ ID NO:1; or
   [0024] (b) said fragment is an N-terminal fragment of 146-155 amino acids in length and comprises at least 146 amino acids corresponding to positions 1 to 146 of SEQ ID NO:1; and
[0025] (2) a second polypeptide domain, wherein the second polypeptide domain comprises an amino acid sequence that shares at least 70, preferably at least 80, more preferably at least 90%, most preferably at least 95% sequence identity with the amino acid sequence set forth in SEQ ID NO:2 over its entire length and comprises the amino acid substitutions 239A, 244A, 858A, and 863A and optionally 940L using the positional numbering of SEQ ID NO:2; and
[0026] wherein, if the first polypeptide domain fragment is an N-terminal fragment, it is fused to the C-terminus of the second polypeptide domain, or if the first polypeptide domain fragment is a C-terminal fragment, it is fused to the N-terminus of the second polypeptide domain.

[0027] In a third aspect, the invention relates to an isolated polypeptide comprising or consisting of
[0028] (1) a fragment of a first polypeptide domain, wherein said first polypeptide domain has an amino acid sequence that
   [0029] (i) shares at least 70, preferably at least 80, more preferably at least 90%, most preferably at least 95% sequence identity with the amino acid sequence set forth in SEQ ID NO:1 over its entire length; and
   [0030] (ii) comprises the amino acid substitution 1730 using the positional numbering of SEQ ID NO:1; and, optionally,
   [0031] (iii) comprises amino acid substitutions at any one or more of the positions corresponding to positions 33, 34, 36, 139, 140, 142, 143, 145, 154, 155, 156, 158, 159, 160, 162, and 164 of SEQ ID NO:1;
   [0032] wherein
   [0033] (a) said fragment is a C-terminal fragment of 230-239 amino acids in length and comprises at least 230 amino acids corresponding to positions 156 to 385 of SEQ ID NO:1; or
   [0034] (b) said fragment is an N-terminal fragment of 146-155 amino acids in length and comprises at least 146 amino acids corresponding to positions 1 to 146 of SEQ ID NO:1; and
[0035] (2) a second polypeptide domain, wherein the second polypeptide domain comprises an amino acid sequence that shares at least 70, preferably at least 80, more preferably at least 90%, most preferably at least 95% sequence identity with the amino acid sequence set forth in SEQ ID NO:3 over its entire length and comprises the amino acid substitutions 133A and 1058A using the positional numbering of SEQ ID NO:3; and
[0036] wherein, if the first polypeptide domain fragment is an N-terminal fragment, it is fused to the C-terminus of the second polypeptide domain, or if the first polypeptide domain fragment is a C-terminal fragment, it is fused to the N-terminus of the second polypeptide domain.

[0037] In another aspect, the invention is directed to a composition comprising at least two polypeptides, wherein the first polypeptide is the isolated polypeptide of the second aspect of the invention and the second polypeptide is the isolated polypeptide of the third aspect of the invention, wherein if the first polypeptide comprises the N-terminal fragment of the first polypeptide domain, the second polypeptide comprises the C-terminal fragment of the first polypeptide domain, or wherein if the first polypeptide comprises the C-terminal fragment of the first polypeptide domain, the second polypeptide comprises the N-terminal fragment of the first polypeptide domain.

[0038] A still further aspect of the invention is directed to the composition comprising the isolated polypeptide of the first aspect of the invention or the above composition of the invention and further comprising a guide RNA (gRNA) molecule.

[0039] In still another aspect, the invention relates to a pharmaceutical composition comprising the isolated polypeptide of the invention or the composition of the invention and one or more of diluents, stabilizers, excipients and carriers.

[0040] Another aspect relates to the isolated polypeptide of the invention or the composition of the invention for use as a pharmaceutical.

[0041] Also encompassed is the use of the isolated polypeptide of the invention or the composition of the invention for targeted RNA editing, including in vitro or in vivo RNA editing.

[0042] In a still further aspect, the invention is directed to a method for targeted editing of the RNA of a cell, comprising introducing into said cell the isolated polypeptide of the invention or the composition of the invention.

[0043] Another aspect relates to a method for the treatment or prevention of SARS-CoV-2 infection, pain (pain management), or epidermolysis bullosa comprising administering a therapeutically or prophylactically effective amount of a composition of the invention to a subject in need thereof.

[0044] A still further aspect also relates to nucleic acid molecules encoding the polypeptides described herein, as well as a vector containing such a nucleic acid, in particular a copying vector or an expression vector.

[0045] In a further aspect, the invention is also directed to a host cell, preferably a non-human host cell, containing a nucleic acid as contemplated herein or a vector as contemplated herein.

[0046] A still further aspect of the invention is a method for manufacturing a polypeptide as described herein, comprising culturing a host cell contemplated herein; and isolating the polypeptide from the culture medium or from the host cell.

### BRIEF DESCRIPTION OF THE DRAWINGS

[0047] FIG. 1. Residues in ADAR2 that are close to and may interact with the bound RNA duplex A are shown in the complex structure of ADAR2 and bound RNA duplex.

[0048] FIG. 2. Residues shown in FIG. 1 were mutated and the effect of the mutations tested, either individually or in various combinations, on the performance of the REPAIR platform using a luciferase recovery assay. (a) The luciferase reporter contains a nonsense mutation at W60 (SEQ ID NO:164). (b) The luciferase reporter contains a nonsense mutation at W219 (SEQ ID NO:167).

[0049] FIG. 3. An alternative Cas13 family member may be used as a scaffold for the ADAR2 deaminase domain. (a) ADAR2 (v1: E488Q only, v2: E488Q and T375G) was fused to the C-terminus of inactive CasRx (dCasRx) and the new CasRx-based enzymes were compared against the original Cas13b-based constructs in luciferase recovery assays. (b-d) The activity of dCasRx-v1 was evaluated when various spacer lengths and mismatch distances were used for the guide RNAs. Overall, it was found that 26 nt spacers worked just as well as, if not better than, 50 nt spacers. It was also found that the optimal mismatch distance for 26 nt spacers was between 7-15 nt.

[0050] FIG. 4. Tuning the design parameters of a dCasRx-based programmable RNA editing platform. (a) Keeping the mismatch distance fixed at 25 nt, while varying the spacer length subcellular localization of the enzyme, and the position of ADAR2 fusion. It was found that the platform only works in the nucleus. Furthermore, C-terminal fusion of the deaminase domain yields higher editing efficiencies than N-terminal fusion. (b-c) Three different linkers between dCasRx and ADAR2 were tested. Overall, when all the luciferase reporters are considered together, the XTEN linker gives significantly higher editing efficiencies than both the short (sequence: Gly-Ser; GS) and long GS (SEQ ID NO:57) linkers. (d) Two copies of ADAR2 at both termini of dCasRx did not give higher editing efficiencies than a single ADAR2 domain fused at the C terminus. (e) Fine tuning the spacer length. Anything shorter than 24 nt is detrimental to the performance of the platform. (f) Varying the identity of the nucleotide opposite the adenosine to be edited. A cytosine is highly favorable for editing. (g) Confirming the optimal guide RNA design with additional luciferase reporters.

[0051] FIG. 5. Validating the efficiency of dCasRx-based RNA editing with optimized design on genome-encoded transcripts, KRAS, PPIB and RAB7A. A range of mismatch distance based on the 7-15 nt window was tested. On all 4 sites, dCasRx-v1 is able to perform just as well as, if not better, than REPAIRv1.

[0052] FIG. 6. Different promising mutant ADAR2 deaminase domains were fused individually to the C-terminus of dCasRx and the efficiency and specificity of these constructs tested using the (a) W60X and (b) W219X luciferase reporters. All the mutations were able to reduce off-target editing, but at some expense of on-target activity.

[0053] FIG. 7. When the deaminase domain is fused at the C-terminus, it may have high flexibility to edit random RNAs independent of dCasRx binding. Without wishing to be bound by any particular theory, it was hypothesized that by fusing ADAR2 internally within dCasRx the freedom of the ADAR2 would be restricted only to the gRNA-target duplex. Hence, using available protein structures of CasRx orthologs, several alternative sites located on the external surface of CasRx that may be amenable to domain fusion as well were identified. 7 sites with varying distance to the gRNA-target duplex were chosen (In1: F406, In2: E689, In3: G655, In4: D338, In5: A376, In6: A878, In7: T558). The first four fusion positions (In1, In2, In3, and In4) will place the ADAR2 deaminase domain closer to the RNA duplex than the C-terminus.

[0054] FIG. 8. It was found that fusion of ADAR2 at three of these internal sites (In2, In3, In4) resulted in appreciable on-target activity and reduced off-target editing in the (a) W60X and (b) W219X luciferase recovery assays. Addition of mutations to the ADAR2 deaminase domain further enhanced the specificity of the enzyme in both the (c) W60X and (d) W219X assays.

[0055] FIG. 9. The findings in FIG. 8 were further validated with additional sites in (a) W104X and (b) W153X. The findings were consistent where dCasRx-v1 In2 fusion provides best on-target efficiency with lower off-target activity which can be improved further when specificity enhancing mutations were added to the ADAR2 domain.

[0056] FIG. 10. It was observed that at the guide RNA-target RNA interface, additional adenosines within the RNA duplex may be edited besides the intended site, termed cis off-targets. To eliminate the cis off-target editing, a guanosine was placed opposite each of these additional adenosines. Using the REPAIRv1 platform, A-G mismatches were introduced at unintended adenosines to guide RNAs targeting (a) KRAS and (b) PPIB. At less than two A-G mismatches, it was found that cis-off target editing is significantly reduced without affecting on-target editing. However, on-target efficiency is slightly reduced when two or more mismatches were introduced. The sequences shown in FIGS. 10a and b are set forth in SEQ ID NOS: 133-144, the target DNA sequences in SEQ ID NOS:145-149.

[0057] FIG. 11. The same strategy as shown in FIG. 10 was employed to the dCasRx-v1 platform to eliminate cis-off target activity. Shown here is an example from GAPDH. It was found that the decrease in on-target activity can be compensated when the guide RNA is extended. The sequences shown in FIG. 11 are set forth in SEQ ID Nos. 172-176.

[0058] FIG. 12. 81 nt Extended gRNA with mismatch distance of 11

[0059] FIG. 13. Extended gRNA with 81 nt with mismatch distance of 11, linked with another adjacent gRNA upstream

[0060] FIG. 14. 81 nt Extended gRNA with mismatch distance of 11, linked with another adjacent gRNA downstream

[0061] FIG. 15. 80 nt Extended gRNA with mismatch distance of 40, linked with another gRNA

[0062] FIG. 16. Luciferase reporter assay using extended gRNA. RNA editing rates using luciferase reporter assay show a higher editing rate when used with dCasRx-K942L. Editing rates were further increased when paired with extended gRNA (extended upstream and downstream) together with dCasRx-K942L.

[0063] FIG. 17. Chromatograms showing RNA editing levels. Higher RNA editing rates (as depicted by red box) using dCasRx paired with normal gRNA or dCasRx-K942L paired with extended gRNA (5′ extend for RAB11A, 3′ extend for RADX, middle mismatch for ACE2).

[0064] FIG. 18. A G mismatch ‘bulge’ was created in the gRNA to counter cis off targets that could be edited.

[0065] FIG. 19. Luciferase reporter assay for editing effect of different mismatch. RNA editing rates using luciferase reporter assay shows effect of mismatch on the opposite of targeted adenosine.

[0066] FIG. 20. Chromatograms showing cis off-target editing. Compared to normal gRNA, extended gRNA could cause some cis off-target editing, which could be decreased by introducing A-G mismatch in the potential off-target sites. On-target and off-target sites were depicted by solid and dotted boxes respectively.

[0067] FIG. 21. Extended gRNA by fusing dCas13b and dCasRx system and their respective gRNAs

[0068] FIG. 22. Extended gRNA by fusing dCas13b and dCasRx system and their respective gRNAs. The gRNAs are driven by their own respective promoters.

[0069] FIG. 23. Luciferase reporter assay using different constructs. Comparison of RNA editing levels using different constructs and gRNAs. Editing level is significantly higher using the extended gRNA system by fusion of dCas13b and dCasRx gRNAs in the cytoplasm.

[0070] FIG. 24. Chromatograms showing RNA editing levels using dCasRx, dCasRx and dCas13b fusion system. RNA editing levels using the extended gRNA fusing dCasRx and dCas13b system with the same promoter shows a higher editing rate in both the nucleus (NLS) and cytoplasm (NES), with editing in the cytoplasm further increase editing efficiency. The sequence shown is set forth in SEQ ID NO:177.

[0071] FIG. 25. The ADAR deaminase domain is split and each half fused to dCas13b and dCasRx. By using the extended gRNA system and their respective gRNAs, the ADAR deaminase domain will be active when they dimerize in close proximity.

[0072] FIG. 26. Site where the ADAR deaminase domain is split—at L464

[0073] FIG. 27. Luciferase reporter assay comparing split ADAR system and dCasRx. RNA editing improved significantly when using split ADAR with 50 gRNA length with 25 mismatch distance having the highest editing rates compared to longer gRNA lengths

[0074] FIG. 28. Luciferase reporter assay for off target. Off target effects (when transfected with a non-targeting gRNA) when using the split ADAR system is 11-fold lower than dCasRx

[0075] FIG. 29. Chromatograms showing RNA editing levels using split ADAR system. RNA editing levels (depicted by the red box) were improved when split ADAR system was used and off target effects reduced.

[0076] FIG. 30. Schematic showing 4 different constructs of the invention for further improvement of the editing activity of an internally fused ADAR system. The different protein fragments were rearranged or the linkers were extended in length. The rationale for constructs (2) and (3) was that it was found from the crystal structure of ADAR2dd that its N- and C-terminus are relatively far apart. When trying to fuse ADAR2dd internally of dCasRx, the N- and C-terminus are forced to come closer together, which may strain the deaminase domain. Hence, it was investigated how it performs if free from this strain. dCasRx-In4 (SEQ ID NO:154), dCasRx-In4-CN (SEQ ID NO:158), dCasRX-In4-CN2 (SEQ ID NO:162), dCasRx-In4-ex-XTEN (SEQ ID NO:163).

[0077] FIG. 31. Luciferase reporter assay evaluating the different strategies to improve the on-target activity and the specificity of an internally fused ADAR system: Off-target plot. Using a random non-targeting gRNA, it was observed that both the dCasRx-In4-CN (SEQ ID NO:158) and dCasRx-In4-CN-K942L (SEQ ID NO:160) give higher off-target editing than dCasRx-In4 (SEQ ID NO:154), but lower off-target editing than dCasRx-v1, i.e. a simple fusion of ADAR2dd at the C-terminus of dCasRx.

[0078] FIG. 32. Luciferase reporter assay evaluating the different strategies to improve the on-target activity and the specificity of an internally fused ADAR system: On-target plot. From the on-target plot (i.e. using a gRNA that correctly targets the intended site), it was observed that dCasRx-In4-CN (SEQ ID NO:158) gives higher activity than dCasRx-In4 (SEQ ID NO:154). Furthermore, the dCasRx K942L mutation (K940L using the positional numbering of SEQ ID NO:2), the construct (SEQ ID NO:160) performs even better. If the H145D mutation is additionally added to the ADAR2dd domain of dCasRx-In4-CN-K942L, the off-target activity becomes remarkably low, but at the same time, the on-target activity is still better than dCasRx-In4 and dCasRx-v1. dCasRx-In4-CN-K942L-H460D (SEQ ID NO:161), which has very low off-target, but also exhibits improved on-target activity is thus one of the preferred constructs of the invention.

[0079] FIG. 33. Chromatograms showing RNA editing levels at an off-target site in F11R, which contains a long double-stranded RNA structure. No off-target is observed in the best-performing construct (dCasRx-In4-CN-K942L-H460D; SEQ ID NO:161).

[0080] FIG. 34. Chromatograms showing RNA editing levels in ACE2 K353 and K31.RNA editing levels (depicted by the red box) using dCasRx(942L) and extended gRNA. The sequences shown are set forth in SEQ ID NO:178 and 179.

[0081] FIG. 35. Chromatograms showing RNA editing levels in TMPRSS2 S441.RNA editing levels (depicted by the red box) using dCasRx(942L) and normal gRNA. The sequence shown is set forth in SEQ ID NO:180.

[0082] FIG. 36. Chromatograms showing RNA editing levels in SCN4A K1244.RNA editing levels (depicted by the red box) using dCasRx(942L) and normal gRNA. The sequence shown is set forth in SEQ ID NO:181.

[0083] FIG. 37. Chromatograms showing RNA editing levels in KRT14 R125.RNA editing levels (depicted by the red box) using dCasRx(942L) and extended gRNA. The sequence shown is set forth in SEQ ID NO:182.

### DETAILED DESCRIPTION

[0084] The present invention is based on the inventors' identification of a novel RNA editing platform that uses the mutated deaminase domain (dd) of RNA Adenosine Deaminase 2 (ADAR2) in combination with a targeting moiety derived from a deactivated endonuclease of the CRISPR-associated (Cas) family of proteins, namely Cas13b or CasRx. The Cas domain uses a guide RNA to target a specific site in an RNA molecule. Once bound to the target, the ADAR2dd converts a target adenosine (A) to inosine (1), which is recognized by cellular machineries as guanosine. This means that an A-to-G change is introduced into the RNA. This approach overcomes drawbacks in existing technologies that suffer from non-specific activity of ADAR that results in binding of generic RNA and thus causes off-target editing. It was furthermore found that the new methods can be further optimized by altering the type and sequence of the targeting moiety, altering the guide RNA sequence, splitting the ADAR deaminase domain into two partial domains each bound to a separate targeting moiety that bind adjacently to each other to the target RNA, and combinations of all these modifications.

[0085] Specifically, the inventors of the present invention first found that the deaminase domain of ADAR2 might be excessively “sticky” and thus possess some non-specific ability to bind to generic RNA. Hence, since RNA is negatively charged due to its phosphate backbone, some positively charged amino acids in the ADAR2 protein were to be mutated. Hence, by examining the published crystal structure of the human ADAR2 deaminase domain, several positively charged residues that are close to the target RNA duplex were identified (see FIG. 1). Then 46 distinct human ADAR2 deaminase mutants (see Table 1) were tested in luciferase recovery assays and several promising mutations, such as H460D, that reduced off-target editing of dCas13b-ADAR2 but still maintained a reasonably good on-target efficiency were identified (see FIG. 2). In addition, since the cell is replete with double-stranded RNAs (dsRNAs), which form ideal substrates for ADAR enzymes, three such dsRNAs located in APOOL, F11R, and XIAP were deeply sequenced after human cells (HEK293T) were transfected with various dCas13b-ADAR constructs in the absence of any targeting guide RNA. Strikingly, all the enzymes tested, including the published REPAIRv2 platform, could edit some of the adenosines located within these dsRNAs (data not shown), thereby indicating that further optimization was required to improve the technology.

[0086] Secondly, another Cas13 family member, called CasRx, was used as a replacement scaffold instead of Cas13b. It was found that fusion of inactive CasRx (dCasRx) to ADAR2 can perform just as well as the known REPAIR platform that uses Cas13b with even lower off-targets in many cases (see FIG. 3). The design of the guide RNA for the dCasRx-ADAR2 fusion construct as well as the design of the editing enzyme itself was further optimized (see FIGS. 3 and 4). Interestingly, guide RNAs with spacers as short as 26 nt could recruit dCasRx-ADAR2 to target sites as efficiently as longer spacers in luciferase recovery assays. The design parameters were confirmed by targeting various endogenous genes (see FIG. 5). Moreover, it was demonstrated that the promising mutant ADAR2 domains that we identified earlier with dCas13b could also work well with dCasRx when they were fused at the C-terminus (see FIG. 6). Since many of the thus generated dCasRx-ADAR2 constructs still exhibited some off-target activity, although largely at low levels, further optimization steps were pursued.

[0087] Thirdly, the inventors discovered that if ADAR2 is fused at the C-terminus, it can have too much flexibility to act on off-target sites. Hence, the Cas13 structure was examined to identify some internal sites where the ADAR2 can be linked to (see FIG. 7). Four of the identified sites are located closer to the guide RNA-target RNA duplex than the C-terminus. It was found that fusion of ADAR2 to most of these internal sites resulted in similar on-target efficiencies but lower off-target editing than the original C-terminus fusion construct. The usage of a mutant ADAR2 domain at an internal site effectively reduces off-target editing to background levels in proof-of-concept luciferase recovery assays (see FIGS. 8 and 9).

[0088] Fourthly, the inventors observed that there were occasionally some cis off-targets located at the guide RNA-target RNA interface. As it was found that a guanosine opposite an adenosine (an A-G mismatch) is highly unfavorable for editing by ADAR, i.e. more unfavorable than the standard A-U match, these cis off-targets could be eliminated by putting guanosines opposite adenosines that were wrongly edited in the guide RNA. This strategy was found to work for both dCas13b-ADAR2dd (see FIG. 10) and dCasRx-ADAR2dd (see FIG. 11).

[0089] Based on these findings, an optimized construct, referred to as “xPERT” (CasRx-based programmable editing of RNA technology), was produced that comprises dCasRx fused internally after D338 to a human ADAR2 deaminase domain with the mutation H460D (H145D using the positional number of SEQ ID NO:1). Said xPERT platform, which consist of a dCasRx linked with either a wildtype or a rationally engineered ADAR2 deaminase domain, could precisely target and edit RNA with a 26 bp gRNA. However, it was found that this system could not edit some sites very well, which might be due to chromatin accessibility, sequence complexity, or hindrance from other RNA-binding proteins (RBPs). Therefore, an extended gRNA system was created to improve editing in these difficult sites. The gRNA was extended in several different ways. Firstly, only the spacer length was extended (FIG. 12). Secondly, two gRNAs were joined together. The intended target site is the adenosine with an adjacent ‘C’ bulge in the bound gRNA. The gRNA could be extended either upstream or downstream of the target site (FIGS. 13 and 14). The hypothesis was that the second dCasRx-ADAR2dd complex could help the first one to access the targeted editing site by displacing other RBPs or smoothing out the RNA secondary structure. Finally, because ADARs tend to bind in the center of long double strand RNA, it was also tried to change the mismatch to the middle of the two gRNAs (FIG. 15).

[0090] CasRx could however process its own gRNA, which will cause the extended gRNA to be cleaved and separated. Lys942 of dCasRx was shown to be critical for this process. Lys942 of dCasRx was thus mutated to Leu to abolish pre-crRNA cleavage (Konermann et al. (2018) Cell 173(3), 665-676). Said K942L mutation is herein also referred to as 940L, using the positional numbering of SEQ ID NO:2.

[0091] A luciferase reporter assay was used to check the editing efficiency. A nonsense mutation of W219X in the luciferase reporter was introduced, and with A-to-I editing, it will recover the luciferase signal. It was found that the K942L mutation could improve the editing efficiency in this site, and K942L with extended gRNA in 5′ or 3′ further increased the editing level to 3.8 to 4.0-fold, compared with dCasRx paired with normal gRNA. When the mismatch was set in the middle, the editing level was increased to more than 50%, 14.3-fold to dCasRx paired with normal gRNA (FIG. 16).

[0092] Next other difficult-to-edit sites in other genes (when using the dCasRx system) were tested and their editing levels checked. It was found that dCasRx K942L with extended gRNA could increase the editing level greatly in most of these sites (FIG. 17).

[0093] When extended gRNA was used, it was found that it will sometimes cause cis off-target editing, especially in the middle of gRNA match region. An A-G mismatch was known to suppress deamination of ADAR2, therefore a G mismatch in the gRNAs was created to reduce cis off-target editing (FIG. 18). It was found that an A-G mismatch could decrease the editing level dramatically in luciferase reporter assay (FIG. 19). Next, it was tried to remove the cis off-target editing in RADX gene induced by extended gRNA. Therefore, a new extended gRNA including guanosines opposite potential off-target adenosines was designed (extended gRNA mG6). It was found that extended gRNA mG6 could remove most of the off-targeting, but it may also decrease the on-target editing level (FIG. 20).

[0094] Another version of “extended gRNA” was thus designed. Here, two individual gRNAs were fused together. The first one is the same gRNA that recruits the dCasRx-ADAR2dd enzyme for programmable RNA editing. The second gRNA has a different stem loop and will recruit dCas13b to bind to an adjacent site. Different Cas proteins may possess different targeting features, so dCas13b can help dCasRx to edit some regions that it cannot bind. Furthermore, as there is only one ADAR2 deaminase domain linked with dCasRx in this system, it can create less off-targeting. The fusion extended gRNA was expressed under a single U6 promoter (FIG. 21). As a comparison, the dCas13b gRNA and the dCasRx gRNAs were also expressed using two different U6 promoters (FIG. 22). It was found that the extended gRNA using dCas13b could help dCasRx to edit some sites in the luciferase reporter system and in endogenous genes. Interestingly, whereas dCasRx itself cannot work very well with NES, with the help of dCas13b, this system could edit efficiently in the cytoplasm. Using two U6 promoters to express two gRNA separately for dCasRx and dCas13b could not increase editing, suggesting that a physical linkage between the two gRNA is important (FIGS. 23 and 24).

[0095] Overexpression of ADAR2 deaminase domain will cause off-target editing in the whole transcriptome. To further decrease the off-target in extended gRNA system, the ADAR2 deaminase domain was split to two parts, and the parts fused to the N-terminal of dCasRx and C-terminal of dCas13b, respectively (FIG. 25). In theory, this system can be active only when dCasRx and dCas13b are in close proximity. The hADAR2 deaminase domain is split at L464 (L149 using the positional numbering of SEQ ID NO:1) in a flexible region (FIG. 26). The split ADAR system utilizes an extended gRNA with the mismatch distance in the middle. In luciferase reporter assays, it was found that the split ADAR2dd system could create editing in targeting sites, with very low off-targeting efficiency as compared with other dCasRx-ADAR2dd systems (FIGS. 27 and 28). The split ADAR2dd system was also tested in endogenous sites, and it was found that it has comparable or higher editing efficiency with normal dCasRx-ADAR2dd (FIG. 29).

[0096] The inventors noticed from the crystal structure of ADAR2dd that its N- and C-terminus are relatively far apart. However, when ADAR2dd is fused at an internal site of dCasRx, the N- and C-terminus of the deaminase are forced to come closer together, which may strain the domain. Hence, to free ADAR2dd from this strain, the inventors rearranged the fragments by moving the back portion of dCasRx to the front (FIG. 30). It was observed from luciferase reporter assays that the newly rearranged construct exhibited higher on-target activity and further introduction of the K942L mutation increased the activity even more (FIGS. 31 and 32). In addition, introduction of the H460D mutation into the rearranged constructs improved their specificity (FIGS. 31 and 32), which was verified by assessing off-target editing of an endogenous gene, F11R (FIG. 33).

[0097] To demonstrate the utility of the xPERT platform, the inventors applied their technology to clinically relevant genes. It was found that specific sites within the ACE2 (FIG. 34), TMPRSS2 (FIG. 35), SCN4A (FIG. 36), and KRT14 (FIG. 37) genes could be robustly edited.

[0098] In summary the inventors discovered multiple options to further improve an ADAR-base RNA editing technology by various modifications to the active ADAR moiety, the Cas family targeting moiety and the gRNA.

[0099] Based on the above findings, the invention, in a first aspect, covers an isolated polypeptide comprising or consisting of
[0100] (1) a first polypeptide domain comprising an amino acid sequence that
   [0101] (i) shares at least 70, preferably at least 80, more preferably at least 90%, most preferably at least 95% sequence identity with the amino acid sequence set forth in SEQ ID NO:1 over its entire length; and
   [0102] (ii) comprises the amino acid substitution 1730 using the positional numbering of SEQ ID NO:1; and, optionally,
   [0103] (iii) comprises amino acid substitutions at any one or more of the positions corresponding to positions 145, 33, 34, 36, 139, 140, 142, 143, 154, 155, 156, 158, 159, 160, 162, and 164 of SEQ ID NO:1 (hADAR2dd);
[0104] (2) a second polypeptide domain comprising an amino acid sequence that shares at least 70, preferably at least 80, more preferably at least 90%, most preferably at least 95% sequence identity with
   [0105] (i) the amino acid sequence set forth in SEQ ID NO:2 over its entire length (dCasRx) and comprises the amino acid substitutions 239A, 244A, 858A, and 863A using the positional numbering of SEQ ID NO:2; or
   [0106] (ii) the amino acid sequence set forth in SEQ ID NO:3 over its entire length (dCas13b) and comprises the amino acid substitutions 133A and 1058A, using the positional numbering of SEQ ID NO:3;
[0107] wherein the first polypeptide domain is fused to the second polypeptide domain or inserted into the second polypeptide domain;
[0108] with the proviso that if the second polypeptide domain comprises an amino acid sequence that shares at least 70, preferably at least 80, more preferably at least 90%, most preferably at least 95% sequence identity with the amino acid sequence set forth in SEQ ID NO:3 and comprises the amino acid substitutions 133A and 1058A, using the positional numbering of SEQ ID NO:3, the first polypeptide domain does not have the amino acid sequence of SEQ ID NO:1 with the amino acid substitution 173Q in combination with one of 33E, 36L, 140G/S/E, 158D, 159E, 160Q, and 162E.

[0109] The isolated polypeptides have RNA deaminase activity in isolated form as they comprise the first polypeptide domain having sufficient structural similarity to human ADAR2. This means that they can convert a target A in an RNA molecule to I and thus introduce a A-to-G conversion. In various embodiments, these first polypeptide domains comprise, consist essentially of or consist of the amino acid sequence as set forth in SEQ ID NO:1 including the given mutations, with the 1730 mutation providing for increased enzymatic activity and any one or more of the mutations in positions 145, 33, 34, 36, 139, 140, 142, 143, 154, 155, 156, 158, 159, 160, 162, and 164 of SEQ ID NO:1 providing for less off-target activity on generic RNA. The polypeptide consisting of the amino acid sequence set forth in SEQ ID NO:1 is also referred to as “hADAR2dd” or “ADAR2” herein.

[0110] The isolated polypeptides also have RNA targeting activity in isolated form as they comprise the second polypeptide domain having sufficient structural similarity to a member of the Cas family of endonucleases, in particular CasRx (SEQ ID NO:2) or Cas13b (SEQ ID NO:3). In various embodiments, these first polypeptide domains comprise, consist essentially of or consist of the amino acid sequence as set forth in SEQ ID NO:2 or SEQ ID NO:3 including the given mutations. The polypeptides consisting of the amino acid sequences set forth in SEQ ID NO:2 and SEQ ID NO:3 are also referred to as “dCasRx” and “dCas13b”, respectively.

[0111] “Isolated”, as used herein, relates to the polypeptide in a form where it has been at least partially separated from other cellular components it may naturally occur or associate with. The polypeptide may be a recombinant polypeptide, i.e. polypeptide produced in a genetically engineered organism that does not naturally produce said polypeptide.

[0112] “Polypeptide”, as used herein, relates to polymers made from amino acids connected by peptide bonds. The polypeptides, as defined herein, can comprise 100 or more amino acids, preferably 200 or more amino acids. “Peptides”, as used herein, relates to polymers made from amino acids connected by peptide bonds. The peptides, as defined herein, can comprise 2 or more amino acids, preferably 5 or more amino acids, more preferably 10 or more amino acids, for example 10 to less than 100 amino acids.

[0113] The isolated polypeptides do, in case the second polypeptide domain is based on SEQ ID NO:3 (Cas13b) and comprises the inactivating mutations 133A and 1058A, specifically if the second polypeptide domain is with the exception of the two mutated sites 100% identical in length and sequence to SEQ ID NO:3, not comprise a first polypeptide domain that comprises only the mutation 173Q or the mutation 173Q in combination with (i) 33E, (ii) 36L, (iii) 140G/S/E, (iv) 158D, (v) 159E, (vi) 1600, or (vii) 162E. This limitation does not apply if the first polypeptide domain comprises 3 or more of the mutations listed above or any of the other mutation(s) recited herein alone or in combination with any one or more of 1730, 33E, 36L, 140G/S/E, 158D, 159E, 1600, and 162E. This limitation does also not apply if the second polypeptide domain is based on SEQ ID NO:2, as defined above.

[0114] In various embodiments of the isolated polypeptides, the first polypeptide domain comprises an amino acid substitution at the position corresponding to position 145 of SEQ ID NO:1.

[0115] In the first polypeptide domain, the recited positions may be mutated to any amino acid residue, such as G, A, V, L, I, F, M, C, S, T, D, E, N, Q, Y, W, R, K, H, and P, with the exception of the residue naturally occurring at this position. In the wildtype sequence, the respective positions are occupied by the following amino acid residues R33, R34, V36, A139, R140, F142, S143, H145, D154, R155, H156, N158, R159, K160, R162, 0164, and E173. Generally, it can be preferred that the target amino acid the respective residue is mutated to, is not a positively charged amino acid, i.e. is not R, K or H. In various embodiments, the target amino acid is thus chosen from G, A, V, L, I, F, M, C, S, T, D, E, N, Q, Y, W, and P. In various embodiments, the substitutions are selected from the following list of amino acid substitutions: 33G, 33A, 33E, 34G, 36L, 139C, 140A, 140D, 142Y, 143A, 145A, 145D, 154A, 155A, 155D, 156A, 158G, 158L, 159A, 159D, 160A, 160D, 160E, 160L, 162A, 164L, and 164V, using the positional numbering of SEQ ID NO:1.

[0116] When referring to amino acid substitutions, the known convention for their designation is used. “R33” thus means that the starting amino acid is R (Arg, arginine) in position 33, i.e. the letter in front of the number indicates the starting amino acid. If no such letter is given, the starting amino acid is not known or irrelevant. In turn, “33G” means that the residue in position 33 is mutated into G (Gly, glycine), i.e. the letter behind the number indicates the target amino acid. “R33G” thus indicates that the starting amino acid R in position 33 is mutated to G. If there are more than one option for the target amino acid, individual target amino acids by be separated by “/”, i.e. “33G/A/E”. This means that the residue in position 33 can be mutated into either of G, A and E. All amino acid residues are generally referred to herein by reference to their one letter code and, in some instances, their three-letter code. This nomenclature is well known to those skilled in the art and used herein as understood in the field.

[0117] In various embodiments of the isolated polypeptide, the first polypeptide domain at least comprises the amino acid substitution 145D using the positional numbering of SEQ ID NO:1. Said mutation may be accompanied by further mutations from the above list, but may also be used alone (i.e. only in combination with the 1730 mutation which is present in all embodiments). Preferred mutations and combinations of mutations are listed in the following Table (Table 1).

TABLE 1
ADAR2 mutations

| ADAR2 Mutant Label | Mutations |
|---|---|
| M0 | E173Q + V36L |
| M1 | E173Q + R33G |
| M2 | E173Q + R34G |
| M3 | E173Q + A139C |
| M4 | E173Q + R140A |
| M5 | E173Q + R150D |
| M6 | E173Q + F142Y |
| M7 | E173Q + S143A |
| M8 | E173Q + H145A |
| M9 | E173Q + H145D |
| M10 | E173Q + D154A |
| M11 | E173Q + R155A |
| M12 | E173Q + R155D |
| M13 | E173Q + H156A |
| M14 | E173Q + N158G |
| M15 | E173Q + N158L |
| M16 | E173Q + R159A |
| M17 | E173Q + R159D |
| M18 | E173Q + K160A |
| M19 | E173Q + K160D |
| M20 | E173Q + K160E |
| M21 | E173Q + K160L |
| M22 | E173Q + R162A |
| M23 | E173Q + Q164L |
| M24 | E173Q + Q164V |
| M25 | E173Q + R33A + V36L |
| M26 | E173Q + R33E + V36L |
| M27 | E173Q + R34G + K160D |
| M28 | E173Q + R140A + S143A |
| M29 | E173Q + R140G + S143A |
| M30 | E173Q + H145D + R155A |
| M31 | E173Q + H145D + R159D |
| M32 | E173Q + H145D + K160D |
| M33 | E173Q + R155A + N158G |
| M34 | E173Q + R155A + K160D |
| M35 | E173Q + N158G + K160A |
| M36 | E173Q + N158G + K160L |
| M37 | E173Q + N158G + Q164L |
| M38 | E173Q + R159D + K160A |
| M39 | E173Q + K160D + Q164L |
| M40 | E173Q + R140A + S143A + K160D |
| M41 | E173Q + H145D + R155A + N158G |
| M42 | E173Q + H145D + N158G + K160L |
| M43 | E173Q + R470A + N158G + K160A |
| M44 | E173Q + N158G + R159D + K160A |
| M45 | E173Q + R155A + N158G + R159D + K160A |

[0118] In various embodiments, the polypeptide of the invention comprises a first polypeptide domain that comprises or consists of an amino acid sequence that is at least 60%, 65%, 70%, 75%, 76%, 77%, 78%, 79%, 80%, 81%, 82%, 83%, 84%, 85%, 86%, 87%, 88%, 89%, 90%, 90.5%, 91%, 91.5%, 92%, 92.5%, 93% Y, 93.5%, 94%, 94.5%, 95%, 95.5%, 96%, 96.5%, 97%, 97.5%, 98%, 98.5%, 99%, 99.1%, 99.2%, 99.3%, 99.4%, 99.5%, 99.6%, or 99.7% identical or homologous to the amino acid sequence set forth in SEQ ID NO:1 over its entire length. This sequence identity/homology relates to the complete sequence of the first polypeptide domain including any one or more of the given mutations. In various embodiments, the first polypeptide domain does not comprise any mutation or sequence variation outside the positions indicated herein, i.e. is 100% identical to the sequence set forth in SEQ ID NO:1 (over its entire length) with the exception of positions 173 and any one or more of 145, 33, 34, 36, 139, 140, 142, 143, 154, 155, 156, 158, 159, 160, 162, and 164. In various embodiments, it can be preferred that the first polypeptide domain does comprise the 1730 mutation and 1, 2, 3, 4, 5 or 6, for example 1, 2, 3, 4 or 5, preferably 1, 2, 3 or 4, more preferably 1, 2 or 3, additional mutations in any of the listed positions. In various embodiments, at least the mutations 1730 and 145D are present. In any of the foregoing embodiments, the first polypeptide domain may also comprise N- and/or C-terminal truncations relative to SEQ ID NO:1, i.e. may lack 1 to 30 amino acids from either or both of its termini. It is preferred that such truncations do not impair its activity. In case truncated versions of SEQ ID NO:1 are comprised in the polypeptides of the invention, it is preferred that the remaining sequence shares the sequence identity/homology disclosed above, preferably that the sequence identity with the exception of the mutated positions is 100%.

[0119] In various embodiments, the invention also features the first polypeptide domains disclosed herein, in particular those comprising any one or more of the above substitutions, as such, i.e. without the second polypeptide domain. In such embodiments, the isolated polypeptide of the invention comprises only the first polypeptide domain as defined herein, but not the second polypeptide domain.

[0120] The identity of nucleic acid sequences or amino acid sequences is generally determined by means of a sequence comparison. This sequence comparison is based on the BLAST algorithm that is established in the existing art and commonly used (cf. for example Altschul et al. (1990) “Basic local alignment search tool”, J. Mol. Biol. 215:403-410, and Altschul et al. (1997): “Gapped BLAST and PSI-BLAST: a new generation of protein database search programs”; Nucleic Acids Res., 25, p. 3389-3402) and is effected in principle by mutually associating similar successions of nucleotides or amino acids in the nucleic acid sequences and amino acid sequences, respectively. A tabular association of the relevant positions is referred to as an “alignment.” Sequence comparisons (alignments), in particular multiple sequence comparisons, are commonly prepared using computer programs which are available and known to those skilled in the art.

[0121] A comparison of this kind also allows a statement as to the similarity to one another of the sequences that are being compared. This is usually indicated as a percentage identity, i.e. the proportion of identical nucleotides or amino acid residues at the same positions or at positions corresponding to one another in an alignment. The more broadly construed term “homology”, in the context of amino acid sequences, also incorporates consideration of the conserved amino acid exchanges, i.e. amino acids having a similar chemical activity, since these usually perform similar chemical activities within the protein. The similarity of the compared sequences can therefore also be indicated as a “percentage homology” or “percentage similarity.” Indications of identity and/or homology can be encountered over entire polypeptides or genes, or only over individual regions. Homologous and identical regions of various nucleic acid sequences or amino acid sequences are therefore defined by way of matches in the sequences. Such regions often exhibit identical functions. They can be small, and can encompass only a few nucleotides or amino acids. Small regions of this kind often perform functions that are essential to the overall activity of the protein. It may therefore be useful to refer sequence matches only to individual, and optionally small, regions. Unless otherwise indicated, however, indications of identity and homology herein refer to the full length of the respectively indicated nucleic acid sequence or amino acid sequence.

[0122] In various embodiments of the isolated polypeptides, the first polypeptide domain has the amino acid sequence set forth in any one of SEQ ID NOS:4-49 or is a variant thereof that has a sequence identity of at least 95%, at least 96%, at least 97%, at least 98%, or at least 99%, including truncated variants, with the mutated positions being invariable.

[0123] In various embodiments, the isolated polypeptide comprises a second polypeptide domain according to (2)(i) that comprises an amino acid substitution in the position corresponding to position 940 of SEQ ID NO:2, preferably 940L.

[0124] In various embodiments, the polypeptide of the invention comprises a second polypeptide domain that comprises or consists of an amino acid sequence that is at least 60%, 65%, 70%, 75%, 76%, 77%, 78%, 79%, 80%, 81%, 82%, 83%, 84%, 85%, 86%, 87%, 88%, 89%, 90%, 90.5%, 91%, 91.5%, 92%, 92.5%, 93%, 93.5%, 94%, 94.5%, 95%, 95.5%, 96%, 96.5%, 97%, 97.5%, 98%, 98.5%, 98.6%, 98.7%, 98.8%, 98.9%, 99.0%, 99.1%, 99.2%, 99.3%, 99.4%, 99.5%, 99.6%, 99.7%, or 99.8% identical or homologous to the amino acid sequence set forth in SEQ ID NO:2 or SEQ ID NO:3 over its entire length. This sequence identity/homology relates to the complete sequence of the second polypeptide domain including any one or more of the given mutations. In various embodiments, the second polypeptide domain does not comprise any mutation or sequence variation outside the positions indicated herein, i.e. is 100% identical to the sequence set forth in SEQ ID NO:2 (over its entire length) with the exception of positions 239, 244, 858, 863 (239A, 244A, 858A, and 863A) and optionally 940, using the positional numbering of SEQ ID NO:2 or is 100% identical to the sequence set forth in SEQ ID NO:3 (over its entire length) with the exception of positions 133 and 1058 (133A and 1058A) using the positional numbering of SEQ ID NO:3. In any of the foregoing embodiments, the second polypeptide domain may also comprise N- and/or C-terminal truncations relative to SEQ ID NO:2 or SEQ ID NO:3, i.e. may lack 1 to 30 amino acids from either or both of its termini. It is preferred that such truncations do not impair its activity. In case truncated versions of SEQ ID NO:2 or SEQ ID NO:3 are comprised in the polypeptides of the invention, it is preferred that the remaining sequence shares the sequence identity/homology disclosed above, preferably that the sequence identity with the exception of the mutated positions is 100%.

[0125] The isolated polypeptide of the invention may, in various embodiments, comprise a second polypeptide domain having the amino acid sequence set forth in any one of SEQ ID NOS:50 to 52.

[0126] The isolated polypeptides of the invention are fusion proteins in that the first and second polypeptide domain are fused to each other. This means that both form part of a polypeptide and are linked to each other either directly or via additional peptide sequence via a peptide bond. In various embodiments, the first polypeptide domain is located C-terminally to the second polypeptide domain. This may mean that the first polypeptide domain is fused to the C-terminus of the second polypeptide domain either directly or via a linker sequence. In such embodiments, the structure of the polypeptide of the invention is, in N to C-terminal orientation, thus:
[0127] PPD2-L-PPD1
   wherein PPD2 is the second polypeptide domain as defined herein, PPD1 is the first polypeptide domain as defined herein and L is a peptide bond or linker peptide sequence. Suitable linker peptide sequences are defined below.

[0128] In various other embodiments, the first polypeptide domain is inserted into the second polypeptide domain. “Inserted”, as used in this context, means that the full length sequence of the second polypeptide domain is split into two parts and that the first polypeptide domain is, in one embodiment, located between those such that its N-terminus is either directly or via a linker sequence linked to the C-terminus of the N-terminal part of the split second polypeptide domain and its C-terminus is either directly or via a linker sequence linked to the N-terminus of the C-terminal part of the split second polypeptide domain. In such embodiments, the structure of the polypeptide of the invention may be, in N- to C-terminal orientation:
[0129] PPD2.1-L-PPD1-L-PPD2.2
   wherein PPD2.1 is the N-terminal part of the second polypeptide domain as defined herein, PPD2.2 is the C-terminal part of the second polypeptide domain as defined herein, wherein PPD2.1 and PPD2.2 if directly fused to each other would form PPD2, PPD1 is the first polypeptide domain as defined herein, and L is a peptide bond or linker peptide sequence. If L is a linker, it may be the linker of SEQ ID NO:55, or the sequence GS plus SEQ ID NO:55, wherein GS is N-terminal to SEQ ID NO:55, in particular in the first L, or C-terminal to SEQ ID NO:55, in particular in the second L.

[0130] Alternatively, “inserted”, as used herein, also means that the first polypeptide domain is fused to one fragment of the split second polypeptide domain, i.e. its N-terminus is fused to the C-terminus of the N-terminal part of the second polypeptide domain or its C-terminus is fused to the N-terminus of the C-terminal part of the second polypeptide domain, and the N-terminal part of the second polypeptide domain is linked by its N-terminus to the C-terminus of the C-terminal part of the second polypeptide domain, either directly or via a linker. In such embodiments, the structure of the polypeptide of the invention may be, in N- to C-terminal orientation:
[0131] PPD2.2-L-PPD2.1-L-PPD1, or
[0132] PPD1-L-PPD2.2-L-PPD2.1
   wherein PPD2.1 is the N-terminal part of the second polypeptide domain as defined herein, PPD2.2 is the C-terminal part of the second polypeptide domain as defined herein, wherein PPD2.1 and PPD2.2 if directly fused to each other in form of PPD2.1-PPD2-2 would form PPD2, PPD1 is the first polypeptide domain as defined herein, and L is a peptide bond or linker peptide sequence. If L is a linker, it may be the linker of SEQ ID NO:55 or SEQ ID NO:55 flanked by two GS (Gly-Ser) sequences. In these constructs, the N- and C-terminus of PPD1 are farther apart than if inserted between two fragments of the PPD2. This puts less strain on the deaminase domain.

[0133] If the first polypeptide domain is inserted into the second polypeptide domain, the site for insertion or split of the second polypeptide domain is typically selected such that the two parts of the second polypeptide domain are still functional and preferably not impaired in their functionality relative to the intact domain. In various embodiments, the first polypeptide domain is thus inserted after position 338, 655 or 689 of the second polypeptide domain, using the positional numbering of SEQ ID NO:2. “Inserted after”, as used in this context, means that the first polypeptide domain is linked, either directly or via a linker, to the C-terminus of the amino acid in position 338, the N-terminus of the amino acid in position 339, or both. More specifically, the first polypeptide domain may
[0134] (A) with its N-terminus be linked to the C-terminus of the amino acid residue in position 338 of the second polypeptide, optionally via a linker, and (1) with its C-terminus to the N-terminus of the amino acid residue in position 339 of the second polypeptide domain, optionally via a linker, or (2) the C-terminus of the C-terminal part of the second polypeptide domain is linked to the N-terminus of the N-terminal part of the second polypeptide domain, optionally via a linker; or
[0135] (B) with its C-terminus be linked to the N-terminus of the amino acid residue in position 339 of the second polypeptide, optionally via a linker, and the C-terminus of the C-terminal part of the second polypeptide domain is linked to the N-terminus of the N-terminal part of the second polypeptide domain, optionally via a linker.

[0136] In the above embodiments, where the first polypeptide domain is inserted after position 338, 655 or 689 of the second polypeptide domain, the second polypeptide domain is preferably that according to (2)(i), i.e. is based on SEQ ID NO:2. A particularly preferred insertion site is after position 338 of the second polypeptide domain, using the positional numbering of SEQ ID NO:2, i.e. the linkage is to the residue in position 338, the residue in position 339 or both.

[0137] Accordingly, in various embodiments, “PPD2.1” as used herein, refers to the amino acid residues corresponding to amino acids 1-338 of SEQ ID NO:2 and “PPD2.2”, as used herein, refers to the amino acid residues corresponding to amino acids 339-967 of SEQ ID NO:2. In various embodiments, PPD2.2 includes the 940L mutation, using the positional numbering of SEQ ID NO:2.

[0138] Irrespective of whether the first polypeptide domain is fused to the terminus of the second polypeptide domain or inserted therein and whether the first or second polypeptide domains are split or not, the isolated polypeptides of the invention can comprise one or more additional amino acid sequences that are located on its N-terminus, the C-terminus and/or between the first and the second polypeptide domains or, in case the first polypeptide domain is inserted into the second polypeptide domain or split domains are used, between each part of the respective polypeptide domain fragments.

[0139] These additional sequences may each be up to 100 amino acids in length. Besides linker sequences that have no specific functionality, the additional sequences may also be functional peptide sequences, including, without limitation, localization peptide sequences, such as nuclear export signals (NES) or nuclear localization signals (NLS). Such NES or NLS sequences may be derived from viral sequences, such as the HIV NES sequence (LQLPPLERLTL; SEQ ID NO:53) or the SV40 NLS sequence (PKKKRKV; SEQ ID NO:54). The polypeptides of the invention may comprise more than one NES or more than one NLS sequence. The NES or NLS sequence may be located on the N- or C-terminus of the polypeptide. Alternatively, or in addition to the localization signals, the polypeptides may comprise linker sequences to link the first and second polypeptide domain to each other. Suitable linker sequences include the XTEN linker sequence having the amino acid sequence set forth in SEQ ID NO:55, or a GS linker sequence with the sequence set forth in SEQ ID NO:57, or shorter variants of the GS linker that comprise only 2-5 amino acids thereof, such as the peptide GS (Gly-Ser; short GS linker), or combinations of the XTEN and GS linker, such as the sequence set forth in SEQ ID NO:56. It is understood that in case the first polypeptide domain is inserted into the second polypeptide domain, such linkers may be present on both its ends.

[0140] In various embodiments, the polypeptides of the invention have a length of up to 1600 amino acids, with the first polypeptide domain being typically up to or equal to 385 amino acids in length, the second polypeptide domain being up to 1090 amino acids in length, such as 967 or 1090 amino acids in length, and the additional sequences present, such as localization signals and linker sequences as defined above, making up the rest, typically about 2 to 200 amino acids in length, preferably 2 to 100 amino acids in length.

[0141] In various embodiments, the polypeptides of the invention may have the following structure:
[0142] NLS-PPD2.1-L-PPD1-L-PPD2.2-NLS; or
[0143] PPD2.2-NLS-L-NLS-PPD2.1-L-PPD1; or
[0144] PPD1-L-PPD2-2-NLS-L-NLS-PPD2-1
[0145] wherein NLS is a nuclear localization signal, optionally of SEQ ID NO:54; PPD1 is the first polypeptide domain as defined herein; PPD2.1 is the N-terminal part of the second polypeptide domain as defined herein, optionally up to and including residue 338, 655 or 689 using the positional numbering of SEQ ID NO:2, PPD2.2 is the C-terminal part of the second polypeptide domain as defined herein, optionally starting from residue 339, 656 or 690; and L is a linker sequence, optionally selected from SEQ ID NO:55, SEQ ID NO:56 or SEQ ID NO:57 or a combination thereof. In such embodiments, PPD2.1 is preferably the fragment 1-338 and PPD2.2 is the fragment 339-967 (using the numbering of SEQ ID NO:2).

[0146] In various embodiments, the polypeptides of the invention may have the following structure:
[0147] NLS-PPD2.1-L1-PPD1-L2-PPD2.2-NLS
[0148] wherein NLS, PPD1, PPD2.1 and PPD2.2 are as defined above and L1 and L2 are each the amino acid sequence set forth in SEQ ID NO:55, or L1 is the amino acid sequences set forth in SEQ ID NO:57+SEQ ID NO:55 directly linked to each other and L2 is the amino acid sequences set forth in SEQ ID NO:55+SEQ ID NO:57 directly linked to each other.

[0149] In various embodiments, the polypeptides of the invention may have the following structure:
[0150] PPD2.2-NLS-L1-NLS-PPD2.1-L2-PPD1
[0151] wherein NLS, PPD1, PPD2.1 and PPD2.2 are as defined above and L1 is the amino acid sequence set forth in SEQ ID NO:55 and L2 is the amino acid sequence set forth in SEQ ID NO:56.

[0152] In various embodiments, the polypeptides of the invention may have the following structure:
[0153] PPD1-L-PPD2-2-NLS-L-NLS-PPD2-1
[0154] wherein NLS, PPD1, PPD2.1 and PPD2.2 are as defined above and L1 is the amino acid sequence set forth in SEQ ID NO:56 and L2 is the amino acid sequence set forth in SEQ ID NO:55.

[0155] In various embodiments of the invention, the isolated polypeptide has the amino acid sequence set forth in any one of SEQ ID NOS: 58-76 or 151-163, for example the sequence set forth in SEQ ID NO:161.

[0156] As detailed above, the inventors found that overexpression of ADAR2 deaminase domain will cause off-target editing in the whole transcriptome and that this may be further decreased by splitting the ADAR2 deaminase domain to two parts, and the parts fused to the N-terminal of dCasRx and C-terminal of dCas13b, respectively.

[0157] Accordingly, in various embodiments, the present invention relates to a fusion protein comprising a split ADAR2 deaminase domain, as defined herein.

[0158] Specifically, in such embodiments, the invention relates to an isolated polypeptide comprising or consisting of
[0159] (1) a fragment of a first polypeptide domain, wherein said first polypeptide domain has an amino acid sequence that
   [0160] (i) shares at least 70, preferably at least 80, more preferably at least 90%, most preferably at least 95% sequence identity with the amino acid sequence set forth in SEQ ID NO:1 over its entire length; and
   [0161] (ii) comprises the amino acid substitution 173Q using the positional numbering of SEQ ID NO:1; and, optionally,
   [0162] (iii) comprises amino acid substitutions at any one or more of the positions corresponding to positions 33, 34, 36, 139, 140, 142, 143, 145, 154, 155, 156, 158, 159, 160, 162, and 164 of SEQ ID NO:1;
   [0163] wherein
   [0164] (a) said fragment is a C-terminal fragment of 230-239 amino acids in length and comprises at least 230 amino acids corresponding to positions 156 to 385 of SEQ ID NO:1; or
   [0165] (b) said fragment is an N-terminal fragment of 146-155 amino acids in length and comprises at least 146 amino acids corresponding to positions 1 to 146 of SEQ ID NO:1; and
[0166] (2) a second polypeptide domain, wherein the second polypeptide domain comprises an amino acid sequence that shares at least 70, preferably at least 80, more preferably at least 90%, most preferably at least 95% sequence identity with the amino acid sequence set forth in SEQ ID NO:2 over its entire length and comprises the amino acid substitutions 239A, 244A, 858A, and 863A and optionally 940L using the positional numbering of SEQ ID NO:2; and
[0167] wherein, if the first polypeptide domain fragment is an N-terminal fragment, it is fused to the C-terminus of the second polypeptide domain, or if the first polypeptide domain fragment is a C-terminal fragment, it is fused to the N-terminus of the second polypeptide domain.

[0168] In these embodiments, the fusion protein comprises a fragment of the ADAR2dd (first polypeptide domain) that comprises either at least amino acids 1 to 146 (N-terminal fragment) or at least amino acids 156 to 385 (C-terminal fragment), using the positional numbering of SEQ ID NO:1. The N-terminal fragment may be up to 155 amino acids in length and thus may comprise amino acids 1 to 155 of SEQ ID NO:1. In various embodiments, it comprises amino acids 1 to 147, 148, 149, 150, 151, 152, 153 or 154 using the numbering of SEQ ID NO:1. The C-terminal fragment may be up to 239 amino acids in length and may start from amino acid 147, 148, 149, 150, 151, 152, 153, 154, 155 or 156 and ending with amino acid 385 using the positional numbering of SEQ ID NO:1.

[0169] In various embodiments, the fragment of ADAR2dd is a C-terminal fragment. Said C-terminal fragment is preferably the fragment corresponding to amino acids 150-385 using the positional numbering of SEQ ID NO:1. In various embodiments, it consists of the amino acids corresponding to positions 150-385 of SEQ ID NO:1, and may include any one or more of the mutations listed herein for said part of the ADAR2dd, i.e. in particular 173Q and optionally one or more mutations in any amino acid corresponding to positions 154, 155, 156, 158, 159, 160, 162, and 164 of SEQ ID NO:1.

[0170] The fusion protein comprising an ADAR2dd fragment further comprises a Cas family polypeptide domain as defined herein (second polypeptide domain). In the afore-mentioned embodiments, this Cas family protein domain is derived from dCasRx having the amino acid sequence set forth in SEQ ID NO:2. All embodiments disclosed above for said second polypeptide domains derived from SEQ ID NO:2 in relation to polypeptides comprising a full ADAR domain, similarly apply to the fusion proteins comprising only part of the ADAR domain. This means that the CasRx domain is inactivated by including the mutations 239A, 244A, 858A, and 863A relative to SEQ ID NO:2. Optionally, they may also include the mutation 940L using the positional numbering of SEQ ID NO:2, for which it was found that it further reduces off-target activity.

[0171] In various embodiments, these isolated polypeptides that are fusions of part of the ADAR domain with dCasRx, may comprise or consist of the amino acid sequence set forth in any one of SEQ ID NOS: 77-78.

[0172] While the above described fusion proteins are those with a CasRx-derived targeting moiety, the invention also features fusion proteins of ADAR2dd fragments with Cas13b-derived second polypeptide domains. Such isolated polypeptides may comprise or consist of
[0173] (1) a fragment of a first polypeptide domain, wherein said first polypeptide sequence has an amino acid sequence that
   [0174] (i) shares at least 70, preferably at least 80, more preferably at least 90%, most preferably at least 95% sequence identity with the amino acid sequence set forth in SEQ ID NO:1 over its entire length; and
   [0175] (ii) comprises the amino acid substitution 1730 using the positional numbering of SEQ ID NO:1; and, optionally,
   [0176] (iii) comprises amino acid substitutions at any one or more of the positions corresponding to positions 33, 34, 36, 139, 140, 142, 143, 145, 154, 155, 156, 158, 159, 160, 162, and 164 of SEQ ID NO:1;
   [0177] wherein
   [0178] (a) said fragment is a C-terminal fragment of 230-239 amino acids in length and comprises at least 230 amino acids corresponding to positions 156 to 385 of SEQ ID NO:1; or
   [0179] (b) said fragment is an N-terminal fragment of 146-155 amino acids in length and comprises at least 146 amino acids corresponding to positions 1 to 146 of SEQ ID NO:1; and
[0180] (2) a second polypeptide domain, wherein the second polypeptide domain comprises an amino acid sequence that shares at least 70, preferably at least 80, more preferably at least 90%, most preferably at least 95% sequence identity with the amino acid sequence set forth in SEQ ID NO:3 over its entire length and comprises the amino acid substitutions 133A and 1058A using the positional numbering of SEQ ID NO:3; and
[0181] wherein, if the first polypeptide domain fragment is an N-terminal fragment, it is fused to the C-terminus of the second polypeptide domain, or if the first polypeptide domain fragment is a C-terminal fragment, it is fused to the N-terminus of the second polypeptide domain.

[0182] In these embodiments, the fusion protein also comprises a fragment of the ADAR2dd (first polypeptide domain) that is defined identical to the ones above, i.e. may comprise either at least amino acids 1 to 146 (N-terminal fragment) or at least amino acids 156 to 385 (C-terminal fragment), using the positional numbering of SEQ ID NO:1. The N-terminal fragment may be up to 155 amino acids in length and thus may comprise amino acids 1 to 155 of SEQ ID NO:1. In various embodiments, it comprises amino acids 1 to 147, 148, 149, 150, 151, 152, 153 or 154 using the numbering of SEQ ID NO:1. The C-terminal fragment may be up to 239 amino acids in length and may start from amino acid 147, 148, 149, 150, 151, 152, 153, 154, 155 or 156 and ending with amino acid 385 using the positional numbering of SEQ ID NO:1.

[0183] In various embodiments, if the fusion proteins with CasRx comprise the C-terminal part of ADAR2dd, the fusion proteins with Cas13b comprise the corresponding N-terminal part and vice versa. It is also understood that these fragments may comprise any of the mutations defined herein.

[0184] In various embodiments, where the second polypeptide domain is derived from Cas13b (SEQ ID NO:3), the first polypeptide domain is an N-terminal fragment and comprises or consists of the amino acids corresponding to amino acids 1-149 of SEQ ID NO:1. In such embodiments, the first polypeptide domain fragment may comprise an amino acid substitution at the position corresponding to position 145 of SEQ ID NO:1, for example the amino acid substitution 145D, using the positional numbering of SEQ ID NO:1.

[0185] These fusion proteins may have a second polypeptide domain based on the amino acid sequence set forth in SEQ ID NO:3, as defined above. All embodiments disclosed above for said second polypeptide domains derived from SEQ ID NO:3 in relation to polypeptides comprising a full ADAR domain, similarly apply to the fusion proteins comprising only part of the ADAR domain. This means that the Cas13b domain is inactivated by including the mutations 133A and 1058A relative to SEQ ID NO:3.

[0186] The isolated polypeptides of the invention that are fusion proteins of an ADAR2 domain fragment and dCas13b, as defined herein, may, in various embodiments, have the amino acid sequence set forth in any one of SEQ ID NOS: 79-80.

[0187] All isolated polypeptides defined above that comprise a fragment of the ADAR2 domain may, similar to those comprising the full length ADAR2dd, comprise one or more additional amino acid sequences that are located on the N-terminus, the C-terminus and/or between the first and the second polypeptide domains. These additional amino acid sequences may also be selected from nuclear export signals (NES), nuclear localization signals (NLS), and linker sequences, preferably any one of the sequences set forth in SEQ ID NOS: 53-57.

[0188] In various embodiments, the fusion protein has the structure (in N- to C-terminal orientation):
[0189] PPD1.2-L-NLS-PPD2-NLS
   wherein PPD1.2 is the C-terminal fragment of the first polypeptide domain, L is a linker amino acid sequence, such as the one having the amino acid sequence set forth in SEQ ID NO:55, NLS is a nuclear localization signal, for example the sequence set forth in SEQ ID NO:54, and PPD2 is the second polypeptide domain, as defined herein, preferably a dCasRx domain based on SEQ ID NO:2.

[0190] In various embodiments, the fusion protein may have the structure:
[0191] NLS-PPD2-NLS-L-PPD1.1 or
[0192] PPD2-NES-L-PPD1.1
   wherein PPD1.1 is the N-terminal fragment of the first polypeptide domain, L is a linker amino acid sequence, such as the one having the amino acid sequence set forth in SEQ ID NO:55, NLS is a nuclear localization signal, for example the sequence set forth in SEQ ID NO:54, NES is a nuclear export signal, such as that set forth in SEQ ID NO:53, and PPD2 is the second polypeptide domain, as defined herein, preferably a dCas13b domain based on SEQ ID NO:3.

[0193] The polypeptides defined above that comprise a fragment of the ADAR2dd as the first polypeptide domain may be combined with each other such that there are at least two different fusion proteins, one comprising the N-terminal fragment of ADAR2dd and one comprising the C-terminal fragment of ADAR2dd. Preferably, these two fusion proteins are as defined above, with one comprising a dCasRx domain and the other comprising a dCas13b domain. Generally, the fusion proteins are combined such that a fully functional ADAR2dd can be formed by adjacent binding of the two fusion proteins to a target RNA.

[0194] The invention thus features compositions comprising at least two polypeptides as defined above, wherein the first polypeptide is the isolated polypeptide comprising a fragment of the first polypeptide domain in combination with a second polypeptide domain based on SEQ ID NO:2 and the second polypeptide is the isolated polypeptide comprising a fragment of the first polypeptide domain that combines with the fragment of the first polypeptide to form the full first polypeptide domain in combination with a second polypeptide domain based on SEQ ID NO:3. In various embodiments, if the first polypeptide comprises the N-terminal fragment of the first polypeptide domain, the second polypeptide comprises the C-terminal fragment of the first polypeptide domain, or wherein if the first polypeptide comprises the C-terminal fragment of the first polypeptide domain, the second polypeptide comprises the N-terminal fragment of the first polypeptide domain.

[0195] In addition to the above-described modifications, polypeptides according to the embodiments described herein can comprise amino acid modifications, in particular amino acid substitutions, insertions, or deletions. Such polypeptides are, for example, further developed by targeted genetic modification, i.e. by way of mutagenesis methods, and optimized for specific purposes or with regard to special properties (for example, with regard to their catalytic activity, stability, etc.). If such additional modifications are introduced into the polypeptides of the invention, these preferably do not affect, alter or reverse the mutations detailed above.

[0196] In various embodiments, the polypeptides may be post-translationally modified, for example glycosylated. Such modification may be carried out by recombinant means, i.e. directly in the host cell upon production, or may be achieved chemically or enzymatically after synthesis of the polypeptide, for example in vitro.

[0197] In various embodiments, the polypeptide may be characterized in that it is obtainable from a polypeptide as described above as an initial molecule by single or multiple conservative amino acid substitution. The term “conservative amino acid substitution” means the exchange (substitution) of one amino acid residue for another amino acid residue, where such exchange does not lead to a change in the polarity or charge at the position of the exchanged amino acid, e.g. the exchange of a nonpolar amino acid residue for another nonpolar amino acid residue. Conservative amino acid substitutions in the context of the invention encompass, for example, G=A=S, I=V=L=M, D=E, N=Q, K=R, Y=F, S=T, G=A=I=V=L=M=Y=F=W=P=S=T. Such changes/modifications are covered by means of the sequence identity/homology levels disclosed above.

[0198] In one aspect, the invention also relates to an isolated polypeptide comprising an amino acid sequence that shares at least 70, preferably at least 80, more preferably at least 90%, most preferably at least 95% sequence identity with the amino acid sequence set forth in SEQ ID NO:2 or SEQ ID NO:150 over its entire length (dCasRx) and comprises an amino acid substitution in the position corresponding to position 940 of SEQ ID NO:2, preferably 940L and, optionally any one or more of 239A, 244A, 858A, and 863A, using the positional numbering of SEQ ID NO:2. In various embodiments, said polypeptide comprises the 2, 3 or all 4 of the substitutions 239A, 244A, 858A, and 863A, using the positional numbering of SEQ ID NO:2. The sequence identity to SEQ ID NO:2 or SEQ ID NO:150 may, with the exception of the above-listed substituted positions be at least 80, 81, 82, 83, 84, 85, 86, 87, 88, 89, 90, 91, 92, 93, 94, 95, 96, 97, 98, 99 or 100%. In various embodiments, said isolated polypeptide is not fused to an ADAR deaminase domain, but may be fused to a different polypeptide (domain).

[0199] The nucleic acid molecules encoding the polypeptides described herein, as well as a vector containing such a nucleic acid, in particular a copying vector or an expression vector, also form part of the present invention.

[0200] These can be DNA molecules or RNA molecules. They can exist as an individual strand, as an individual strand complementary to said individual strand, or as a double strand. With DNA molecules in particular, the sequences of both complementary strands in all three possible reading frames are to be considered in each case. Also, to be considered is the fact that different codons, i.e. base triplets, can code for the same amino acids, so that a specific amino acid sequence can be coded by multiple different nucleic acids. As a result of this degeneracy of the genetic code, all nucleic acid sequences that can encode one of the above-described polypeptides are included in this subject of the invention. The skilled artisan is capable of unequivocally determining these nucleic acid sequences, since despite the degeneracy of the genetic code, defined amino acids are to be associated with individual codons. The skilled artisan can therefore, proceeding from an amino acid sequence, readily ascertain nucleic acids coding for that amino acid sequence. In addition, in the context of nucleic acids according to the present invention one or more codons can be replaced by synonymous codons. This aspect refers in particular to heterologous expression of the polypeptides contemplated herein. For example, every organism, e.g. a host cell of a production strain, possesses a specific codon usage. “Codon usage” is understood as the translation of the genetic code into amino acids by the respective organism. Bottlenecks in protein biosynthesis can occur if the codons located on the nucleic acid are confronted, in the organism, with a comparatively small number of loaded tRNA molecules. Although it codes for the same amino acid, the result is that a codon becomes translated in the organism less efficiently than a synonymous codon that codes for the same amino acid. Because of the presence of a larger number of tRNA molecules for the synonymous codon, the latter can be translated more efficiently in the organism.

[0201] By way of methods commonly known today such as, for example, chemical synthesis or the polymerase chain reaction (PCR) in combination with standard methods of molecular biology or protein chemistry, a skilled artisan has the ability to manufacture, on the basis of known DNA sequences and/or amino acid sequences, the corresponding nucleic acids all the way to complete genes. Such methods are known, for example, from Sambrook, J., Fritsch, E. F., and Maniatis, T, 2001, Molecular cloning: a laboratory manual, 3rd edition, Cold Spring Laboratory Press.

[0202] “Vectors” are understood for purposes herein as elements—made up of nucleic acids—that contain a nucleic acid contemplated herein as a characterizing nucleic acid region. They enable said nucleic acid to be established as a stable genetic element in a species or a cell line over multiple generations or cell divisions. In particular when used in bacteria, vectors are special plasmids, i.e. circular genetic elements. In the context herein, a nucleic acid as contemplated herein is cloned into a vector. Included among the vectors are, for example, those whose origins are bacterial plasmids, viruses, or bacteriophages, or predominantly synthetic vectors or plasmids having elements of widely differing derivations. Using the further genetic elements present in each case, vectors are capable of establishing themselves as stable units in the relevant host cells over multiple generations. They can be present extrachromosomally as separate units, or can be integrated into a chromosome respectively into chromosomal DNA.

[0203] Expression vectors encompass nucleic acid sequences which are capable of replicating in the host cells, by preference microorganisms, particularly preferably bacteria, that contain them, and expressing therein a contained nucleic acid. In various embodiments, the vectors described herein thus also contain regulatory elements that control expression of the nucleic acids encoding a polypeptide of the invention. Expression is influenced in particular by the promoter or promoters that regulate transcription. Expression can occur in principle by means of the natural promoter originally located in front of the nucleic acid to be expressed, but also by means of a host-cell promoter furnished on the expression vector or also by means of a modified, or entirely different, promoter of another organism or of another host cell. In the present case at least one promoter for expression of a nucleic acid as contemplated herein is made available and used for expression thereof. Expression vectors can furthermore be regulated, for example by way of a change in culture conditions or when the host cells containing them reach a specific cell density, or by the addition of specific substances, in particular activators of gene expression. One example of such a substance is the galactose derivative isopropyl-beta-D-thiogalactopyranoside (IPTG), which is used as an activator of the bacterial lactose operon (lac operon). In contrast to expression vectors, the contained nucleic acid is not expressed in cloning vectors.

[0204] In a further aspect, the invention is also directed to a host cell, preferably a non-human host cell, containing a nucleic acid as contemplated herein or a vector as contemplated herein. A nucleic acid as contemplated herein or a vector containing said nucleic acid is preferably transformed into a microorganism, which then represents a host cell according to an embodiment. Methods for the transformation of cells are established in the existing art and are sufficiently known to the skilled artisan. All cells are in principle suitable as host cells, i.e. prokaryotic or eukaryotic cells. Those host cells that can be manipulated in genetically advantageous fashion, e.g. as regards transformation using the nucleic acid or vector and stable establishment thereof, are preferred, for example single-celled fungi or bacteria. In addition, preferred host cells are notable for being readily manipulated in microbiological and biotechnological terms. This refers, for example, to easy culturability, high growth rates, low demands in terms of fermentation media, and good production and secretion rates for foreign proteins. The polypeptides can furthermore be modified, after their manufacture, by the cells producing them, for example by the addition of sugar molecules, formylation, amination, etc. Post-translation modifications of this kind can functionally influence the polypeptide

[0205] Further embodiments are represented by those host cells whose activity can be regulated on the basis of genetic regulation elements that are made available, for example, on the vector, but can also be present a priori in those cells. They can be stimulated to expression, for example, by controlled addition of chemical compounds that serve as activators, by modifying the culture conditions, or when a specific cell density is reached. This makes possible economical production of the proteins contemplated herein. One example of such a compound is IPTG, as described earlier.

[0206] Host cells can be prokaryotic or bacterial cells, such as E. coli cells. Bacteria are notable for short generation times and few demands in terms of culturing conditions. As a result, economical culturing methods respectively manufacturing methods can be established. In addition, the skilled artisan has ample experience in the context of bacteria in fermentation technology. Gram-negative or Gram-positive bacteria may be suitable for a specific production instance, for a wide variety of reasons to be ascertained experimentally in the individual case, such as nutrient sources, product formation rate, time requirement, etc. In various embodiments, the host cells may be E. coli cells.

[0207] Host cells contemplated herein can be modified in terms of their requirements for culture conditions, can comprise other or additional selection markers, or can also express other or additional proteins. They can, in particular, be those host cells that transgenically express multiple proteins or enzymes.

[0208] The host cell can, however, also be a eukaryotic cell, which is characterized in that it possesses a cell nucleus. A further embodiment is therefore represented by a host cell which is characterized in that it possesses a cell nucleus. In contrast to prokaryotic cells, eukaryotic cells are capable of post-translationally modifying the protein that is formed. Examples thereof are fungi such as Actinomycetes, or yeasts such as Saccharomyces or Kluyveromyces or insect cells, such as Sf9 cells. This may be particularly advantageous, for example, when the proteins, in connection with their synthesis, are intended to experience specific modifications made possible by such systems. Among the modifications that eukaryotic systems carry out in particular in conjunction with protein synthesis are, for example, the bonding of low-molecular-weight compounds such as membrane anchors or oligosaccharides. In various embodiments, the host cells are thus eukaryotic cells, such as insect cells, for example Sf9 cells.

[0209] The host cells contemplated herein are cultured and fermented in a usual manner, for example in discontinuous or continuous systems. In the former case a suitable nutrient medium is inoculated with the host cells, and the product is harvested from the medium after a period of time to be ascertained experimentally. Continuous fermentations are notable for the achievement of a flow equilibrium in which, over a comparatively long period of time, cells die off in part but are also in part renewed, and the protein formed can simultaneously be removed from the medium.

[0210] Host cells contemplated herein are preferably used to manufacture the polypeptides described herein.

[0211] A further aspect of the invention is therefore a method for manufacturing a polypeptide as described herein, comprising culturing a host cell contemplated herein; and isolating the polypeptide from the culture medium or from the host cell. Culture conditions and mediums can be selected by those skilled in the art based on the host organism used by resorting to general knowledge and techniques known in the art.

[0212] The isolated polypeptides described herein, including those comprising the full length ADAR2dd and those comprising only a fragment thereof, may be combined with at least one guide RNA (gRNA) molecule. The gRNA molecule facilitates target RNA recognition, binding and editing in that it—together with the Cas family protein domain—directs the fusion protein to its target RNA site. The invention is thus also directed to a composition comprising any one or more of the polypeptides of the invention, including the compositions/combinations of two polypeptides each comprising part of the ADAR2dd, and at least one gRNA molecule.

[0213] In various embodiments, the gRNA molecule comprises a sequence that forms a stem-loop structure and a spacer sequence directly linked to one end of the stem forming sequence. More specifically, the gRNA molecule comprises
[0214] (1) a target-specific antisense sequence (spacer sequence) that is at least 24 nucleotides in length and comprises a mismatch C nucleotide at the position that base-pairs with the A to be edited in the target sequence; and
[0215] (2) a Cas-binding sequence that is at least 26 nucleotides in length and is recognized and bound by the second polypeptide domain, wherein said sequence has a level of self-complementarity such that a stem-loop structure is formed.

[0216] “Base-pairs”, as used in this context, refers to Watson-Crick base-pairing of RNA molecules, i.e. G-C and A-U. The target-specific sequence comprises an RNA antisense sequence that hybridizes to the target sequence by such Watson-Crick base-pairing and may have high complementarity or even full complementarity with the exception of the target A in the target sequence which is mismatched with C to facilitate the deaminase activity of the ADAR2dd. In order to avoid off-target editing of additional A nucleobases in the target sequence, the gRNA molecule may in the target-specific sequence comprise additional mismatches where said additional A nucleotides in the target sequence are mismatched with G in the gRNA. Accordingly, in various embodiments, the target-specific sequence comprises one or more mismatch G nucleotides at sites that (base-)pair with A nucleotides in the target sequence. These off-targets are also referred to as “cis off-targets” and are typically located closer to the nearest terminus relative to the mismatch site. In various embodiments, the number of said additional G-A mismatches in the spacer sequence is 1, 2 or more, preferably 1 or 2.

[0217] Generally, the target-specific sequence has little to no self-complementarity to avoid formation of secondary structures that could interfere with target recognition and binding. Said part of the gRNA molecule is thus single-stranded.

[0218] The target-specific sequence may be located 3′ to the Cas-binding sequence. This means that it is connected to the 3′ end of the sequence forming the stem-loop structure. Alternatively, it may be located 5′ to the Cas-binding sequence, i.e. it is connected to the 5′ end of the sequence forming the stem-loop structure.

[0219] In various embodiments, the mismatch site in the target-specific antisense sequence is located at least 6 nucleotides away from the nearest terminus of the gRNA, for example 7 or more nucleotides. This distance is also referred to as “mismatch distance”. The mismatch site may be located 6 or more nucleotides down- or upstream of the connection point to the double-stranded Cas-binding part, i.e. the stem. Typical distances may be 11 nucleotides, 22 nucleotides, 40 nucleotides, depending on the length of the spacer sequence. For spacer sequences in the range of 20 to 30 nucleotides, for example 26 or 27 nucleotides, the mismatch sequence may, for example, be 7 to 15 nucleotides, such as 8-14 nucleotides or 9-13 nucleotides, or 10-12 nucleotides or 11 nucleotides. For longer spacers, such as spacers of more than 30 and up to 50 or 55 nucleotides in length, the mismatch distance may be greater, for example 11 to 40 nucleotides, such as 22 to 30 nucleotides, for example 23-28 nucleotides, for example 25 nucleotides. A mismatch distance of more than 30 and up to 40 nucleotides is however preferably used in gRNA dimers, as disclosed below.

[0220] The total length of the gRNA molecule may be up to 150 nucleotides, preferably up to 100 nucleotides, even more preferably up to 90 nucleotides, or up to 81 nucleotides. The total length refers to the sum of the length of the Cas-binding sequence, i.e. the stem-loop structure, and the length of the target-specific sequence, also referred to as “spacer” sequence. The stem loop-structure is typically about 26 nucleotides in length, for example 30 or 32 to 40 nucleotides, and the spacer length may vary from 24 to about 55 nucleotides. The minimum total length of the gRNA is typically about 50 nucleotides. Typical lengths of the spacer sequence are 25 to 30 nucleotides. However, the inventors have found that under certain circumstances extended spacer sequences having more than 30 nucleotides, for example up to 50 nucleotides may be advantageous. The length of the spacer sequence also correlates with the desired mismatch distance, as the mismatch is preferably at least 6 nucleotides away from the nearest terminus.

[0221] The Cas-binding sequence is typically about 30 nucleotides in length, for example about 26 to 40 nucleotides, such as 36 nucleotides. The stem-structure may be about 8 to 16 nucleotides in length, for example about 14 nucleotides, while the loop structure may be 2 to 10 nucleotides in length, for example 8 nucleotides. The two sequence parts forming the stem have enough complementarity to hybridize to each other under conditions of use, i.e. typically under conditions as encountered in a cell, including the cytoplasm and the nucleus. These two sequence parts forming the stem flank the unpaired sequence forming the loop. The spacer sequence is typically directly connected to one of the stem-forming sequences. Optionally, the other stem-forming sequence not connected to the spacer may also be extended by a sequence that does not form an intermolecular double-stranded structure. Said sequence may be another spacer sequence that has target complementarity and extends, relatively to the first spacer sequence, in the other direction of the target molecule. However, said second spacer sequence does typically not contain a C-A mismatch, wherein the position in the spacer sequence pairing with an A in the target sequence is occupied by a C. The second spacer may however contain G-A mismatches, where the positions pairing with A in the target sequence are occupied by G to avoid off-target editing.

[0222] Accordingly, the gRNA may comprise two target-specific sequences that flank the Cas-binding sequence (2), wherein preferably one of the two target-specific sequences is free of mismatches, i.e. of C-A mismatches, and the other is the target-specific sequence (1).

[0223] In various embodiments, the gRNA may be a dimer in that it comprises two gRNA units linked to each other, for example by a phosphodiester bond. In various embodiments, the two units differ in that one unit is a gRNA molecule as defined above and the other is linked to it upstream (to its 3′ end) or downstream (to its 5′ end) but contains no mismatch for ADAR2dd-mediated editing. The two units are preferably designed such that they hybridize to adjacent parts in the target sequence and thus recruit two polypeptides of the invention (Cas-ADAR2 fusion proteins). Specifically, the gRNA molecule as defined above may be linked to a second gRNA molecule that comprises
[0224] (1) a target-specific antisense sequence that is at least 24 nucleotides in length; and
[0225] (2) a Cas-binding sequence that is at least 30 nucleotides in length and is recognized and bound by the second polypeptide domain, wherein said sequence has a level of self-complementarity such that a stem-loop structure is formed.

[0226] The two units of the gRNA dimer may be part of a single nucleotide sequence and thus are typically linked by a phosphodiester bond. As noted above, the two gRNA molecules (unity) may differ in that one of the two molecules does not comprise a C mismatch in the target-complementary sequence. In addition, and in various embodiments, they may also differ in their Cas-binding sequences.

[0227] In such dimers, the orientation of the two units may be such that the mismatch site is between the two Cas-binding sequences. It may be arranged closer to one of those two stem-loop-structures, such as having a mismatch distance of 11, or may be located in the middle between the two, for example having a mismatch distance of 40. The location in the middle between the two Cas-binding sequences has the advantage that it becomes accessible for both ADAR2dd units of the fusion proteins binding to the two Cas-binding sequences. This can significantly increase the editing level relative to a “normal” monomeric gRNA.

[0228] In various embodiments, the gRNA comprising two units comprises two Cas-binding sequences that recruit dCasRx. These may be identical. This allows to recruit two fusion proteins of the invention and thus increase editing efficiency, as two ADAR2 deaminase domains are brought in close proximity of the target site.

[0229] As dCasRx can process its own gRNA, which will cleave and separate the extended gRNA (dimeric gRNA), the CasRx domain preferably contains the 940L mutation that was shown to abolish pre-CrRNA cleavage (Konermann et al., supra).

[0230] In various embodiments, the gRNA comprising two units comprises two Cas-binding sequences, one for recruiting dCasRx and the other for recruiting dCas13b. It was found that the recruitment of dCas13b in addition to a dCasRx-based fusion protein of the invention may help in editing some target cites in reporter assays and endogenous genes. Furthermore, said gRNA also allowed efficient editing in the cytoplasm due to the improvement of the compatibility with a NES, as facilitated by the help of dCas13b.

[0231] The compositions of the invention that comprise one or more polypeptides of the invention in combination with at least one gRNA, with the gRNA being functional with the polypeptides comprised in the composition, may be used for targeted editing of RNA in a cell, either in vitro or in vivo.

[0232] The targeted RNA that is edited may, in various embodiments, be mRNA. Suitable mRNAs that may be targeted by the compositions of the invention include, without limitation,
[0233] (1) the mRNA coding for the cell surface receptor angiotensin-converting enzyme 2 (ACE2);
[0234] (2) the mRNA coding for the cellular protease TMPRSS2 (transmembrane protease serine 2 isoform 2);
[0235] (3) the mRNA coding for the voltage-gated sodium channel Nav1.4 (SCN4A); and
[0236] (4) the mRNA transcript of the keratin 5 (KRT5) or keratin 14 (KRT14) gene.

[0237] The sequences of these target genes may be those set forth in SEQ ID NO:81 (ACE2), SEQ ID NO:82 (TMPRSS2); SEQ ID NO:83 (KRT14) and SEQ ID NO:84 (SCN4A).

[0238] In these embodiments, the gRNA may target the codons coding for K31 or K353 of ACE2 receptor, the codon coding for S441 of TMPRSS2, the codon coding for K1244 of SCN4A, or the codon coding for R125 of keratin. It is to be understood that these target transcripts and the specified sites are proof-of-concept targets, but that the compositions and methods of the present invention can be adapted to edit numerous other targets and sites.

[0239] Various gRNA sequences that have been used in accordance with the invention are those that are obtained by transcription of the DNA sequences set forth in SEQ ID NOS: 85-132.

[0240] The invention also features compositions that comprise at least one nucleic acid sequence or molecule encoding at least one polypeptide of the invention, optionally in combination with a gRNA or a nucleic acid sequence or molecule coding for said gRNA. The nucleic acid sequence coding for the polypeptide of the invention and the nucleic acid coding for the gRNA may be on the same or separate molecules.

[0241] The invention is also directed to pharmaceutical compositions comprising the isolated polypeptides of the invention or the nucleic acid encoding them or the compositions of the invention and further comprising one or more of diluents, stabilizers, excipients and carriers.

[0242] The isolated polypeptides of the invention, the nucleic acids encoding them or the compositions of the invention may be for use as a pharmaceutical. The invention is thus also directed to the use of the isolated polypeptides of the invention, the nucleic acids encoding them or the compositions of the invention for targeted RNA editing. Said targeted RNA editing may be in vitro, for example in cultured cells, or may be in vivo. Examples of targeted RNAs have been disclosed above, but the invention is not limited thereto.

[0243] The invention is also directed to methods for targeted editing of the RNA in a cell, comprising introducing into said cell the isolated polypeptide of the invention, a nucleic acid encoding it, or the composition of the invention. Such methods may be for the treatment or prevention of a disease or disorder caused by RNA, for example an aberrant RNA transcript or pathogenic RNA, such as viral RNA.

[0244] These methods may for example be used for the treatment or prevention of SARS-CoV-2 infection, comprising administering a therapeutically or prophylactically effective amount of a composition of the invention that targets the mRNA coding for the cell surface receptor angiotensin-converting enzyme 2 (ACE2) or the cellular protease TMPRSS2 (transmembrane protease serine 2 isoform 2), in particular the codons coding for K31 or K353 of ACE2 receptor or the codon coding for S441 of TMPRSS2, to a subject in need thereof.

[0245] In alternative embodiments, the methods may be used for the treatment or prevention of pain (pain management), comprising administering a therapeutically or prophylactically effective amount of a composition of the invention that targets the mRNA coding for the voltage-gated sodium channel Nav1.4 (SCN4A), in particular the codon coding for K1244 of SCN4A, to a subject in need thereof.

[0246] In still alternative embodiments, the methods may be used for the treatment or prevention of epidermolysis bullosa, comprising administering a therapeutically or prophylactically effective amount of a composition of the invention that targets the mRNA coding for keratin 5 or keratin 14, in particular the codon coding for R125 of keratin, to a subject in need thereof.

[0247] In all the above methods, the subject may be a human.

[0248] All embodiments disclosed herein in relation to the polypeptides and nucleic acids are similarly applicable to the compositions, uses and methods described herein and vice versa.

[0249] The invention is further illustrated by the following non-limiting examples and the appended claims.

### EXAMPLES

[0250] Materials and Methods

### Example 1

[0251] Design and Cloning of Constructs

[0252] The gRNA expression plasmids were generated using as backbones pC0043 (Addgene #103864) for Cas13b and pXR003 (Addgene #109053) for CasRx. First, pC0043 or pXR003 was digested with Bbsl-HF (New England Biolabs) and gel extracted. Second, reverse complementary single-stranded DNA oligonucleotides containing the relevant spacer sequences were ordered from Integrated DNA Technologies (IDT). Third, the oligonucleotides were phosphorylated, annealed together, and then ligated into the digested plasmids using T4 DNA Ligase (New England Biolabs).

[0253] To generate the various mutant constructs in our study, site-directed mutagenesis using the QuikChange Lightning Site-Directed Mutagenesis Kit (Agilent #210519) was carried out. The primers for all the missense mutations were designed using the online QuikChange Primer Design program (https://www.agilent.com/store/primerDesignProgram.jsp). Mutagenesis was performed on a sub-cloned human ADAR2(E488Q) deaminase vector. For the luciferase reporters, the W60X (SEQ ID NO:164), W104X (SEQ ID NO:165), W153X (SEQ ID NO:166), or W219X (SEQ ID NO:167) mutation was directly introduced into the Renilla luciferase gene in the psi-check2 plasmid. All cloned constructs were sequence-verified before use.

[0254] Cell Culture

[0255] Cell culture experiments were performed using HEK293FT, HeLa, and HCT116 human cell lines, which were cultured using Dulbecco's Modified Eagle Medium (DMEM) with high glucose (Hyclone), supplemented with 10% fetal bovine serum (FBS) (Hyclone), 1× L-glutamine (Gibco), and 0.2× penicillin-streptomycin (Gibco). To introduce constructs into the cells, 1.8×10⁵ cells were seeded in a 24-well plate one day prior to transfection to reach ˜70% confluency the next day. 300 ng of gRNA plasmid was co-transfected with 300 ng of dCas13b-ADAR2 or dCasRx-ADAR2 plasmid using jetPRIME transfection reagent according to manufacturer's instructions. RNA was harvested 48h post transfection. For luciferase assays, 3.6×10⁴ cells were seeded in 96-well white plate one day prior to transfection. Subsequently, 58 ng of gRNA plasmid was co-transfected with 58 ng of dCas13b-ADAR2 or dCasRx-ADAR2 plasmid and 4 ng of luciferase reporter plasmid using jetPRIME transfection reagent.

[0256] RNA Isolation and cDNA Synthesis

[0257] RNA was either lysed using TRizol (Invitrogen), then further isolated using Direct-zol RNA Miniprep kit (Zymo Research), or by using RNAzol (Molecular Research Center) according to manufacturer's instructions. 500 ng to 1 ug of RNA was used for cDNA synthesis using qScript cDNA Supermix (Quantabio). RNA samples were treated with DNasel (New England Biolabs) before cDNA synthesis when using RNAzol as the extraction method.

[0258] Assessment of RNA Editing in Human Cells

[0259] The extent of programmable RNA editing was assessed using three different methods:
[0260] (1) Luciferase assay: The luciferase activity was measured 48h post transfection using the Promaga dual luciferase assay kit according to manufacturer's instructions in a Promega Glomax Multi Detection Plate Reader.
[0261] (2) Sanger sequencing: The target loci were amplified by PCR using reverse transcribed cDNA and 05 High-Fidelity DNA Polymerase (New England Biolabs). The PCR products were extracted from a 2% agarose gel using PureNA Gel Extraction kit (Research Instruments) and then sent for Sanger sequencing by Axil Scientific.
[0262] (3) Next generation sequencing: Sequencing libraries were constructed via two rounds of PCR. In the first round, the loci-of-interest were amplified from reverse transcribed cDNA using 05 High-Fidelity DNA Polymerase (New England Biolabs). Each forward primer contains the common sequence GCG TTA TCG AGG TCN NNN (SEQ ID NO:168), while each reverse primer contains the common sequence GTG CTC TTC CGA TCT (SEQ ID NO:169). In the second round, the PCR products from the first round were barcoded with the following primers: forward, AAT GAT ACG GCG ACC ACC GAG ATC TAC ACC CTA CAC GAG CGT TAT CGA GGT C (SEQ ID NO:170); reverse, CAA GCA GAA GAC GGC ATA CGA GAT (barcode) GTG ACT GGA GTT CAG ACG TGT GCT CTT CCG ATC T (SEQ ID NO:171). 10-bp barcodes designed by Fluidigm for the Access Array System were used. All samples were sequenced on NextSeq or HiSeq (Illumina) to produce paired 151-bp reads.

1. Isolated polypeptide comprising or consisting of
(1) a first polypeptide domain comprising an amino acid sequence that
(i) shares at least 70, preferably at least 80, more preferably at least 90%, most preferably at least 95% sequence identity with the amino acid sequence set forth in SEQ ID NO:1 over its entire length; and
(ii) comprises the amino acid substitution 173Q using the positional numbering of SEQ ID NO:1; and, optionally,
(iii) comprises amino acid substitutions at any one or more of the positions corresponding to positions 145, 33, 34, 36, 139, 140, 142, 143, 154, 155, 156, 158, 159, 160, 162, and 164 of SEQ ID NO:1 (hADAR2dd);
(2) a second polypeptide domain comprising an amino acid sequence that shares at least 70, preferably at least 80, more preferably at least 90%, most preferably at least 95% sequence identity with
(i) the amino acid sequence set forth in SEQ ID NO:2 over its entire length (dCasRx) and comprises the amino acid substitutions 239A, 244A, 858A, and 863A using the positional numbering of SEQ ID NO-2; or
(ii) the amino acid sequence set forth in SEQ ID NO:3 over its entire length (dCas13b) and comprises the amino acid substitutions 133A and 1058A, using the positional numbering of SEQ ID NO:3;
wherein the first polypeptide domain is fused to the second polypeptide domain or inserted into the second polypeptide domain;
with the proviso that if the second polypeptide domain comprises an amino acid sequence that shares at least 70, preferably at least 80, more preferably at least 90%, most preferably at least 95% sequence identity with the amino acid sequence set forth in SEQ ID NO:3 and comprises the amino acid substitutions 133A and 1058A, using the positional numbering of SEQ ID NO:3, the first polypeptide domain does not have the amino acid sequence of SEQ ID NO:1 with the amino acid substitution 173Q in combination with one of 33E, 36L, 140G/S/E, 158D, 159E, 1600, and 162E.

2. The isolated polypeptide of claim 1, wherein the first polypeptide domain comprises an amino acid substitution at the position corresponding to position 145 of SEQ ID NO:1.

3. The isolated polypeptide of claim 1 or 2, wherein the first polypeptide domain comprises any one or more of the amino acid substitutions 33G, 33A, 33E, 34G, 36L, 139C, 140A, 140D, 142Y, 143A, 145A, 145D, 154A, 155A, 155D, 156A, 158G, 158L, 159A, 159D, 160A, 160D, 160E, 160L, 162A, 164L, and 164V, using the positional numbering of SEQ ID NO:1.

4. The isolated polypeptide of any one of claims 1 to 3, wherein the first polypeptide domain comprises the amino acid substitution 145D, using the positional numbering of SEQ ID NO:1.

5. The isolated polypeptide of any one of claims 1 to 4, wherein the first polypeptide domain has the amino acid sequence set forth in any one of SEQ ID NOS:4-49.

6. The isolated polypeptide of any one of claims 1 to 5, wherein the second polypeptide domain comprises an amino acid substitution in the position corresponding to position 940 of SEQ ID NO:2, preferably 940L.

7. The isolated polypeptide of any one of claims 1 to 6, wherein the second polypeptide domain has the amino acid sequence set forth in any one of SEQ ID NOS:50-52.

8. The isolated polypeptide of any one of claims 1 to 7, wherein the first polypeptide domain is located C-terminally to the second polypeptide domain.

9. The isolated polypeptide of claim 8, wherein the first polypeptide domain is fused to the C-terminus of the second polypeptide domain.

10. The isolated polypeptide of any one of claims 1 to 7, wherein the first polypeptide domain is inserted into the second polypeptide domain.

11. The isolated polypeptide of claim 10, wherein the first polypeptide domain is inserted after position 338, 655 or 689 of the second polypeptide domain, using the positional numbering of SEQ ID NO:2.

12. The isolated polypeptide of claim 11, wherein the first polypeptide domain is inserted after position 338 of the second polypeptide domain, using the positional numbering of SEQ ID NO:2.

13. The isolated polypeptide of any one of claims 1 to 12, wherein the isolated polypeptide comprises one or more additional amino acid sequences that are located on the N-terminus, the C-terminus and/or between the first and the second polypeptide domains.

14. The isolated polypeptide of claim 13, wherein the one or more additional amino acid sequences are selected from nuclear export signals (NES), nuclear localization signals (NLS), and linker sequences, preferably any one of the sequences set forth in SEQ ID NOS: 53-57.

15. The isolated polypeptide of any one of claims 1 to 14, wherein the polypeptide has the amino acid sequence set forth in any one of SEQ ID NOS: 58-76.

16. An isolated polypeptide comprising or consisting of
(1) a fragment of a first polypeptide domain, wherein said first polypeptide domain has an amino acid sequence that
(i) shares at least 70, preferably at least 80, more preferably at least 90%, most preferably at least 95% sequence identity with the amino acid sequence set forth in SEQ ID NO:1 over its entire length; and
(ii) comprises the amino acid substitution 1730 using the positional numbering of SEQ ID NO:1; and, optionally,
(iii) comprises amino acid substitutions at any one or more of the positions corresponding to positions 33, 34, 36, 139, 140, 142, 143, 145, 154, 155, 156, 158, 159, 160, 162, and 164 of SEQ ID NO:1;
wherein
(c) said fragment is a C-terminal fragment of 230-239 amino acids in length and comprises at least 230 amino acids corresponding to positions 156 to 385 of SEQ ID NO:1; or
(d) said fragment is an N-terminal fragment of 146-155 amino acids in length and comprises at least 146 amino acids corresponding to positions 1 to 146 of SEQ ID NO:1; and
(2) a second polypeptide domain, wherein the second polypeptide domain comprises an amino acid sequence that shares at least 70, preferably at least 80, more preferably at least 90%, most preferably at least 95% sequence identity with the amino acid sequence set forth in SEQ ID NO:2 over its entire length and comprises the amino acid substitutions 239A, 244A, 858A, and 863A and optionally 940L using the positional numbering of SEQ ID NO-2; and
wherein, if the first polypeptide domain fragment is an N-terminal fragment, it is fused to the C-terminus of the second polypeptide domain, or if the first polypeptide domain fragment is a C-terminal fragment, it is fused to the N-terminus of the second polypeptide domain.

17. The isolated polypeptide of claim 16, wherein the first polypeptide domain fragment is a C-terminal fragment and comprises or consists of the amino acids corresponding to amino acids 150-385 of SEQ ID NO:1.

18. The isolated polypeptide of claim 16 or 17, wherein the polypeptide has the amino acid sequence set forth in any one of SEQ ID NOS: 77-78.

19. An isolated polypeptide comprising or consisting of
(1) a fragment of a first polypeptide domain, wherein said first polypeptide domain has an amino acid sequence that
(i) shares at least 70, preferably at least 80, more preferably at least 90%, most preferably at least 95% sequence identity with the amino acid sequence set forth in SEQ ID NO:1 over its entire length; and
(ii) comprises the amino acid substitution 1730 using the positional numbering of SEQ ID NO:1; and, optionally,
(iii) comprises amino acid substitutions at any one or more of the positions corresponding to positions 33, 34, 36, 139, 140, 142, 143, 145, 154, 155, 156, 158, 159, 160, 162, and 164 of SEQ ID NO:1;
wherein
(a) said fragment is a C-terminal fragment of 230-239 amino acids in length and comprises at least 230 amino acids corresponding to positions 156 to 385 of SEQ ID NO:1; or
(b) said fragment is an N-terminal fragment of 146-155 amino acids in length and comprises at least 146 amino acids corresponding to positions 1 to 146 of SEQ ID NO:1; and
(2) a second polypeptide domain, wherein the second polypeptide domain comprises an amino acid sequence that shares at least 70, preferably at least 80, more preferably at least 90%, most preferably at least 95% sequence identity with the amino acid sequence set forth in SEQ ID NO:3 over its entire length and comprises the amino acid substitutions 133A and 1058A using the positional numbering of SEQ ID NO:3; and
wherein, if the first polypeptide domain fragment is an N-terminal fragment, it is fused to the C-terminus of the second polypeptide domain, or if the first polypeptide domain fragment is a C-terminal fragment, it is fused to the N-terminus of the second polypeptide domain.

20. The isolated polypeptide of claim 19, wherein the first polypeptide domain comprises an amino acid substitution at the position corresponding to position 145 of SEQ ID NO:1.

21. The isolated polypeptide of claim 19 or 20, wherein the first polypeptide domain is an N-terminal fragment and comprises or consists of the amino acids corresponding to amino acids 1-149 of SEQ ID NO:1

22. The isolated polypeptide of any one of claims 19 to 21, wherein the first polypeptide domain comprises the amino acid substitution 145D, using the positional numbering of SEQ ID NO:1.

23. The isolated polypeptide of any one of claims 19 to 22, wherein the polypeptide has the amino acid sequence set forth in any one of SEQ ID NOS: 79-80.

24. The isolated polypeptide of any one of claims 16 to 23, wherein the isolated polypeptide comprises one or more additional amino acid sequences that are located on the N-terminus, the C-terminus and/or between the first and the second polypeptide domains.

25. The isolated polypeptide of claim 24, wherein the one or more additional amino acid sequences are selected from nuclear export signals (NES), nuclear localization signals (NLS), and linker sequences, preferably any one of the sequences set forth in SEQ ID NOS: 53-57.

26. Composition comprising at least two polypeptides, wherein the first polypeptide is the isolated polypeptide of any one of claims 16 to 18, 24 and 25 and the second polypeptide is the isolated polypeptide of any one of claims 19 to 25, wherein if the first polypeptide comprises the N-terminal fragment of the first polypeptide domain, the second polypeptide comprises the C-terminal fragment of the first polypeptide domain, or wherein if the first polypeptide comprises the C-terminal fragment of the first polypeptide domain, the second polypeptide comprises the N-terminal fragment of the first polypeptide domain.

27. Composition comprising the isolated polypeptide of any one of claims 1 to 15 or the composition of claim 26 and further comprising a guide RNA (gRNA) molecule.

28. The composition of claim 27, wherein the gRNA molecule comprises
(1) a target-specific antisense sequence (spacer sequence) that is at least 24 nucleotides in length and comprises a mismatch C nucleotide at the position that base-pairs with the A to be edited in the target sequence; and
(2) a Cas-binding sequence that is at least 26 nucleotides in length and is recognized and bound by the second polypeptide domain, wherein said sequence has a level of self-complementarity such that a stem-loop structure is formed.

29. The composition of claim 28, wherein the target-specific sequence is located 3′ relative to the Cas-binding sequence.

30. The composition of claim 28, wherein the target-specific sequence is located 5′ relative to the Cas-binding sequence.

31. The composition of any one of claims 28 to 30, wherein the mismatch site is located at least 6 nucleotides away from the nearest terminus of the gRNA.

32. The composition of any one of claims 28 to 31, wherein the target-specific sequence comprises one or more mismatch G nucleotides at sites that pair with A nucleotides in the target sequence.

33. The composition of any one of claims 28 to 32, wherein the gRNA comprises two target-specific sequences that flank the Cas-binding sequence (2), wherein preferably one of the two target-specific sequences is free of mismatches and the other is the target-specific sequence (1).

34. The composition of any one of claims 28 to 33, wherein the gRNA molecule is up to 100 nucleotides in length.

35. The composition of any one of claims 28 to 34, wherein the gRNA molecule is linked to a second gRNA molecule that comprises
(1) a target-specific antisense sequence that is at least 24 nucleotides in length; and
(2) a Cas-binding sequence that is at least 26 nucleotides in length and is recognized and bound by the second polypeptide domain, wherein said sequence has a level of self-complementarity such that a stem-loop structure is formed.

36. The composition of claim 35, wherein the two gRNA molecules are linked by a phosphodiester bond.

37. The composition of claim 35 or 36, wherein the two gRNA molecules differ in that one of the two molecules does not comprise a C mismatch in the target-complementary sequence.

38. The composition of any one of claims 35 to 37, wherein the two gRNA molecules differ in the Cas-binding sequence.

39. The composition of any one of claims 27 to 38, wherein the gRNA targets the mRNA coding for the cell surface receptor angiotensin-converting enzyme 2 (ACE2).

40. The composition of claim 39, wherein the gRNA targets the codons coding for K31 or K353 of ACE2 receptor.

41. The composition of any one of claims 27 to 38, wherein the gRNA targets the mRNA coding for the cellular protease TMPRSS2.

42. The composition of claim 41, wherein the gRNA targets the codon coding for S441 of TMPRSS2.

43. The composition of any one of claims 27 to 38, wherein the gRNA targets the mRNA coding for the voltage-gated sodium channel Nav1.4 (SCN4A).

44. The composition of claim 43, wherein the gRNA targets the codon coding for K1244 of SCN4A.

45. The composition of any one of claims 27 to 38, wherein the gRNA targets the mRNA transcript of the keratin 5 (KRT5) or keratin 14 (KRT14) gene.

46. The composition of claim 45, wherein the gRNA targets the codon coding for R125 of keratin.

47. Pharmaceutical composition comprising the isolated polypeptide of any one of claims 1 to 25 or the composition of any one of claims 26 to 46 and one or more of diluents, stabilizers, excipients and carriers.

48. The isolated polypeptide of any one of claims 1 to 25 or the composition of any one of claims 26 to 46 for use as a pharmaceutical.

49. Use of the isolated polypeptide of any one of claims 1 to 25 or the composition of any one of claims 26 to 46 for targeted RNA editing.

50. Method for targeted editing of the RNA of a cell, comprising introducing into said cell the isolated polypeptide of any one of claims 1 to 25 or the composition of any one of claims 26 to 46.

51. Method for the treatment or prevention of SARS-CoV-2 infection, comprising administering a therapeutically or prophylactically effective amount of a composition of any one of claims 39-42 to a subject in need thereof.

52. Method for the treatment or prevention of pain (pain management), comprising administering a therapeutically or prophylactically effective amount of a composition of any one of claims 43-44 to a subject in need thereof.

53. Method for the treatment or prevention of epidermolysis bullosa, comprising administering a therapeutically or prophylactically effective amount of a composition of any one of claims 45-46 to a subject in need thereof.

54. The method of any one of claims 51-53, wherein the subject is a human.

55. Isolated polypeptide comprising an amino acid sequence that shares at least 70, preferably at least 80, more preferably at least 90%, most preferably at least 95% sequence identity with the amino acid sequence set forth in SEQ ID NO:2 over its entire length (dCasRx) and comprises an amino acid substitution in the position corresponding to position 940 of SEQ ID NO-2, preferably 940L and, optionally any one or more of 239A, 244A, 858A, and 863A, using the positional numbering of SEQ ID NO:2.

The application's sequence listing, which the Patent Office published only in electronic form, follows.

SEQUENCE LISTING (182 sequences)

SEQ ID NO: 1 - protein, 385 aa, Artificial
  hADAR2 deaminase domain
QLHLPQVLADAVSRLVLGKFGDLTDNFSSPHARRKVLAGVVMTTGTDVKDAKVISVSTGTKCINGEYMSDRGLALNDCHAEIISRRSLLRFLYTQLELYLNNKDDQKRSIFQKSERGGFRLKENVQFHLYISTSPCGDARIFSPHEPILEEPADRHPNRKARGQLRTKIESGEGTIPVRSNASIQTWDGVLQGERLLTMSCSDKIARWNVVGIQGSLLSIFVEPIYFSSIILGSLYHGDHLSRAMYQRISNIEDLPPLYTLNKPLLSGISNAEARQPGKAPNFSVNWTVGDSAIEVINATTGKDELGRASRLCKHALYCRWMRVHGKVPSHLLRSKITKPNVYHESKLAAKEYQAAKARLFTAFIKAGLGAWVEKPTEQDQFSLT

SEQ ID NO: 2 - protein, 967 aa, Artificial
  Synthetic CasRx
MIEKKKSFAKGMGVKSTLVSGSKVYMTTFAEGSDARLEKIVEGDSIRSVNEGEAFSAEMADKNAGYKIGNAKFSHPKGYAVVANNPLYTGPVQQDMLGLKETLEKRYFGESADGNDNICIQVIHNILDIEKILAEYITNAAYAVNNISGLDKDIIGFGKFSTVYTYDEFKDPEHHRAAFNNNDKLINAIKAQYDEFDNFLDNPRLGYFGQAFFSKEGRNYIINYGNECYDILALLSGLRHWVVHNNEEESRISRTWLYNLDKNLDNEYISTLNYLYDRITNELTNSFSKNSAANVNYIAETLGINPAEFAEQYFRFSIMKEQKNLGFNITKLREVMLDRKDMSEIRKNHKVFDSIRTKVYTMMDFVIYRYYIEEDAKVAAANKSLPDNEKSLSEKDIFVINLRGSFNDDQKDALYYDEANRIWRKLENIMHNIKEFRGNKTREYKKKDAPRLPRILPAGRDVSAFSKLMYALTMFLDGKEINDLLTTLINKFDNIQSFLKVMPLIGVNAKFVEEYAFFKDSAKIADELRLIKSFARMGEPIADARRAMYIDAIRILGTNLSYDELKALADTFSLDENGNKLKKGKHGMRNFIINNVISNKRFHYLIRYGDPAHLHEIAKNEAVVKFVLGRIADIQKKQGQNGKNQIDRYYETCIGKDKGKSVSEKVDALTKIITGMNYDQFDKKRSVIEDTGRENAEREKFKKIISLYLTVIYHILKNIVNINARYVIGFHCVERDAQLYKEKGYDINLKKLEEKGFSSVTKLCAGIDETAPDKRKDVEKEMAERAKESIDSLESANPKLYANYIKYSDEKKAEEFTRQINREKAKTALNAYLRNTKWNVIIREDLLRIDNKTCTLFRNKAVHLEVARYVHAYINDIAEVNSYFQLYHYIMQRIIMNERYEKSSGKVSEYFDAVNDEKKYNDRLLKLLCVPFGYCIPRFKNLSIEALFDRNEAAKFDKEKKKVSGNS

SEQ ID NO: 3 - protein, 1090 aa, Artificial
  Synthetic Cas13b
MNIPALVENQKKYFGTYSVMAMLNAQTVLDHIQKVADIEGEQNENNENLWFHPVMSHLYNAKNGYDKQPEKTMFIIERLQSYFPFLKIMAENQREYSNGKYKQNRVEVNSNDIFEVLKRAFGVLKMYRDLTNHYKTYEEKLNDGCEFLTSTEQPLSGMINNYYTVALRNMNERYGYKTEDLAFIQDKRFKFVKDAYGKKKSQVNTGFFLSLQDYNGDTQKKLHLSGVGIALLICLFLDKQYINIFLSRLPIFSSYNAQSEERRIIIRSFGINSIKLPKDRIHSEKSNKSVAMDMLNEVKRCPDELFTTLSAEKQSRFRIISDDHNEVLMKRSSDRFVPLLLQYIDYGKLFDHIRFHVNMGKLRYLLKADKTCIDGQTRVRVIEQPLNGFGRLEEAETMRKQENGTFGNSGIRIRDFENMKRDDANPANYPYIVDTYTHYILENNKVEMFINDKEDSAPLLPVIEDDRYVVKTIPSCRMSTLEIPAMAFHMFLFGSKKTEKLIVDVHNRYKRLFQAMQKEEVTAENIASFGIAESDLPQKILDLISGNAHGKDVDAFIRLTVDDMLTDTERRIKRFKDDRKSIRSADNKMGKRGFKQISTGKLADFLAKDIVLFQPSVNDGENKITGLNYRIMQSAIAVYDSGDDYEAKQQFKLMFEKARLIGKGTTEPHPFLYKVFARSIPANAVEFYERYLIERKFYLTGLSNEIKKGNRVDVPFIRRDQNKWKTPAMKTLGRIYSEDLPVELPRQMFDNEIKSHLKSLPQMEGIDFNNANVTYLIAEYMKRVLDDDFQTFYQWNRNYRYMDMLKGEYDRKGSLQHCFTSVEEREGLWKERASRTERYRKQASNKIRSNRQMRNASSEEIETILDKRLSNSRNEYQKSEKVIRRYRVQDALLFLLAKKTLTELADFDGERFKLKEIMPDAEKGILSEIMPMSFTFEKGGKKYTITSEGMKLKNYGDFFVLASDKRIGNLLELVGSDIVSKEDIMEEFNKYDQCRPEISSIVFNLEKWAFDTYPELSARVDREEKVDFKSILKILLNNKNINKEQSDILRKIRNAFDHNNYPDKGVVEIKALPEIAMSIKKAFGEYAIMK

SEQ ID NO: 4 - protein, 385 aa, Artificial
  Synthetic hADAR2dd R348G E488Q
QLHLPQVLADAVSRLVLGKFGDLTDNFSSPHAGRKVLAGVVMTTGTDVKDAKVISVSTGTKCINGEYMSDRGLALNDCHAEIISRRSLLRFLYTQLELYLNNKDDQKRSIFQKSERGGFRLKENVQFHLYISTSPCGDARIFSPHEPILEEPADRHPNRKARGQLRTKIESGQGTIPVRSNASIQTWDGVLQGERLLTMSCSDKIARWNVVGIQGSLLSIFVEPIYFSSIILGSLYHGDHLSRAMYQRISNIEDLPPLYTLNKPLLSGISNAEARQPGKAPNFSVNWTVGDSAIEVINATTGKDELGRASRLCKHALYCRWMRVHGKVPSHLLRSKITKPNVYHESKLAAKEYQAAKARLFTAFIKAGLGAWVEKPTEQDQFSLT

SEQ ID NO: 5 - protein, 385 aa, Artificial
  Synthetic hADAR2dd R349G E488Q
QLHLPQVLADAVSRLVLGKFGDLTDNFSSPHARGKVLAGVVMTTGTDVKDAKVISVSTGTKCINGEYMSDRGLALNDCHAEIISRRSLLRFLYTQLELYLNNKDDQKRSIFQKSERGGFRLKENVQFHLYISTSPCGDARIFSPHEPILEEPADRHPNRKARGQLRTKIESGQGTIPVRSNASIQTWDGVLQGERLLTMSCSDKIARWNVVGIQGSLLSIFVEPIYFSSIILGSLYHGDHLSRAMYQRISNIEDLPPLYTLNKPLLSGISNAEARQPGKAPNFSVNWTVGDSAIEVINATTGKDELGRASRLCKHALYCRWMRVHGKVPSHLLRSKITKPNVYHESKLAAKEYQAAKARLFTAFIKAGLGAWVEKPTEQDQFSLT

SEQ ID NO: 6 - protein, 385 aa, Artificial
  Synthetic hADAR2dd V351L E488Q
QLHLPQVLADAVSRLVLGKFGDLTDNFSSPHARRKLLAGVVMTTGTDVKDAKVISVSTGTKCINGEYMSDRGLALNDCHAEIISRRSLLRFLYTQLELYLNNKDDQKRSIFQKSERGGFRLKENVQFHLYISTSPCGDARIFSPHEPILEEPADRHPNRKARGQLRTKIESGQGTIPVRSNASIQTWDGVLQGERLLTMSCSDKIARWNVVGIQGSLLSIFVEPIYFSSIILGSLYHGDHLSRAMYQRISNIEDLPPLYTLNKPLLSGISNAEARQPGKAPNFSVNWTVGDSAIEVINATTGKDELGRASRLCKHALYCRWMRVHGKVPSHLLRSKITKPNVYHESKLAAKEYQAAKARLFTAFIKAGLGAWVEKPTEQDQFSLT

SEQ ID NO: 7 - protein, 385 aa, Artificial
  Synthetic hADAR2dd A454C E488Q
QLHLPQVLADAVSRLVLGKFGDLTDNFSSPHARRKVLAGVVMTTGTDVKDAKVISVSTGTKCINGEYMSDRGLALNDCHAEIISRRSLLRFLYTQLELYLNNKDDQKRSIFQKSERGGFRLKENVQFHLYISTSPCGDCRIFSPHEPILEEPADRHPNRKARGQLRTKIESGQGTIPVRSNASIQTWDGVLQGERLLTMSCSDKIARWNVVGIQGSLLSIFVEPIYFSSIILGSLYHGDHLSRAMYQRISNIEDLPPLYTLNKPLLSGISNAEARQPGKAPNFSVNWTVGDSAIEVINATTGKDELGRASRLCKHALYCRWMRVHGKVPSHLLRSKITKPNVYHESKLAAKEYQAAKARLFTAFIKAGLGAWVEKPTEQDQFSLT

SEQ ID NO: 8 - protein, 385 aa, Artificial
  Synthetic hADAR2dd R455A E488Q
QLHLPQVLADAVSRLVLGKFGDLTDNFSSPHARRKVLAGVVMTTGTDVKDAKVISVSTGTKCINGEYMSDRGLALNDCHAEIISRRSLLRFLYTQLELYLNNKDDQKRSIFQKSERGGFRLKENVQFHLYISTSPCGDAAIFSPHEPILEEPADRHPNRKARGQLRTKIESGQGTIPVRSNASIQTWDGVLQGERLLTMSCSDKIARWNVVGIQGSLLSIFVEPIYFSSIILGSLYHGDHLSRAMYQRISNIEDLPPLYTLNKPLLSGISNAEARQPGKAPNFSVNWTVGDSAIEVINATTGKDELGRASRLCKHALYCRWMRVHGKVPSHLLRSKITKPNVYHESKLAAKEYQAAKARLFTAFIKAGLGAWVEKPTEQDQFSLT

SEQ ID NO: 9 - protein, 385 aa, Artificial
  Synthetic hADAR2dd R455D E488Q
QLHLPQVLADAVSRLVLGKFGDLTDNFSSPHARRKVLAGVVMTTGTDVKDAKVISVSTGTKCINGEYMSDRGLALNDCHAEIISRRSLLRFLYTQLELYLNNKDDQKRSIFQKSERGGFRLKENVQFHLYISTSPCGDADIFSPHEPILEEPADRHPNRKARGQLRTKIESGQGTIPVRSNASIQTWDGVLQGERLLTMSCSDKIARWNVVGIQGSLLSIFVEPIYFSSIILGSLYHGDHLSRAMYQRISNIEDLPPLYTLNKPLLSGISNAEARQPGKAPNFSVNWTVGDSAIEVINATTGKDELGRASRLCKHALYCRWMRVHGKVPSHLLRSKITKPNVYHESKLAAKEYQAAKARLFTAFIKAGLGAWVEKPTEQDQFSLT

SEQ ID NO: 10 - protein, 385 aa, Artificial
  Synthetic hADAR2dd F457Y E488Q
QLHLPQVLADAVSRLVLGKFGDLTDNFSSPHARRKVLAGVVMTTGTDVKDAKVISVSTGTKCINGEYMSDRGLALNDCHAEIISRRSLLRFLYTQLELYLNNKDDQKRSIFQKSERGGFRLKENVQFHLYISTSPCGDARIYSPHEPILEEPADRHPNRKARGQLRTKIESGQGTIPVRSNASIQTWDGVLQGERLLTMSCSDKIARWNVVGIQGSLLSIFVEPIYFSSIILGSLYHGDHLSRAMYQRISNIEDLPPLYTLNKPLLSGISNAEARQPGKAPNFSVNWTVGDSAIEVINATTGKDELGRASRLCKHALYCRWMRVHGKVPSHLLRSKITKPNVYHESKLAAKEYQAAKARLFTAFIKAGLGAWVEKPTEQDQFSLT

SEQ ID NO: 11 - protein, 385 aa, Artificial
  Synthetic hADAR2dd S458A E488Q
QLHLPQVLADAVSRLVLGKFGDLTDNFSSPHARRKVLAGVVMTTGTDVKDAKVISVSTGTKCINGEYMSDRGLALNDCHAEIISRRSLLRFLYTQLELYLNNKDDQKRSIFQKSERGGFRLKENVQFHLYISTSPCGDARIYAPHEPILEEPADRHPNRKARGQLRTKIESGQGTIPVRSNASIQTWDGVLQGERLLTMSCSDKIARWNVVGIQGSLLSIFVEPIYFSSIILGSLYHGDHLSRAMYQRISNIEDLPPLYTLNKPLLSGISNAEARQPGKAPNFSVNWTVGDSAIEVINATTGKDELGRASRLCKHALYCRWMRVHGKVPSHLLRSKITKPNVYHESKLAAKEYQAAKARLFTAFIKAGLGAWVEKPTEQDQFSLT

SEQ ID NO: 12 - protein, 385 aa, Artificial
  Synthetic hADAR2dd H460A E488Q
QLHLPQVLADAVSRLVLGKFGDLTDNFSSPHARRKVLAGVVMTTGTDVKDAKVISVSTGTKCINGEYMSDRGLALNDCHAEIISRRSLLRFLYTQLELYLNNKDDQKRSIFQKSERGGFRLKENVQFHLYISTSPCGDARIFSPAEPILEEPADRHPNRKARGQLRTKIESGQGTIPVRSNASIQTWDGVLQGERLLTMSCSDKIARWNVVGIQGSLLSIFVEPIYFSSIILGSLYHGDHLSRAMYQRISNIEDLPPLYTLNKPLLSGISNAEARQPGKAPNFSVNWTVGDSAIEVINATTGKDELGRASRLCKHALYCRWMRVHGKVPSHLLRSKITKPNVYHESKLAAKEYQAAKARLFTAFIKAGLGAWVEKPTEQDQFSLT

SEQ ID NO: 13 - protein, 385 aa, Artificial
  Synthetic hADAR2dd H460D E488Q
QLHLPQVLADAVSRLVLGKFGDLTDNFSSPHARRKVLAGVVMTTGTDVKDAKVISVSTGTKCINGEYMSDRGLALNDCHAEIISRRSLLRFLYTQLELYLNNKDDQKRSIFQKSERGGFRLKENVQFHLYISTSPCGDARIFSPDEPILEEPADRHPNRKARGQLRTKIESGQGTIPVRSNASIQTWDGVLQGERLLTMSCSDKIARWNVVGIQGSLLSIFVEPIYFSSIILGSLYHGDHLSRAMYQRISNIEDLPPLYTLNKPLLSGISNAEARQPGKAPNFSVNWTVGDSAIEVINATTGKDELGRASRLCKHALYCRWMRVHGKVPSHLLRSKITKPNVYHESKLAAKEYQAAKARLFTAFIKAGLGAWVEKPTEQDQFSLT

SEQ ID NO: 14 - protein, 385 aa, Artificial
  Synthetic hADAR2dd D469A E488Q
QLHLPQVLADAVSRLVLGKFGDLTDNFSSPHARRKVLAGVVMTTGTDVKDAKVISVSTGTKCINGEYMSDRGLALNDCHAEIISRRSLLRFLYTQLELYLNNKDDQKRSIFQKSERGGFRLKENVQFHLYISTSPCGDARIFSPHEPILEEPAARHPNRKARGQLRTKIESGQGTIPVRSNASIQTWDGVLQGERLLTMSCSDKIARWNVVGIQGSLLSIFVEPIYFSSIILGSLYHGDHLSRAMYQRISNIEDLPPLYTLNKPLLSGISNAEARQPGKAPNFSVNWTVGDSAIEVINATTGKDELGRASRLCKHALYCRWMRVHGKVPSHLLRSKITKPNVYHESKLAAKEYQAAKARLFTAFIKAGLGAWVEKPTEQDQFSLT

SEQ ID NO: 15 - protein, 385 aa, Artificial
  Synthetic hADAR2dd R470A E488Q
QLHLPQVLADAVSRLVLGKFGDLTDNFSSPHARRKVLAGVVMTTGTDVKDAKVISVSTGTKCINGEYMSDRGLALNDCHAEIISRRSLLRFLYTQLELYLNNKDDQKRSIFQKSERGGFRLKENVQFHLYISTSPCGDARIFSPHEPILEEPADAHPNRKARGQLRTKIESGQGTIPVRSNASIQTWDGVLQGERLLTMSCSDKIARWNVVGIQGSLLSIFVEPIYFSSIILGSLYHGDHLSRAMYQRISNIEDLPPLYTLNKPLLSGISNAEARQPGKAPNFSVNWTVGDSAIEVINATTGKDELGRASRLCKHALYCRWMRVHGKVPSHLLRSKITKPNVYHESKLAAKEYQAAKARLFTAFIKAGLGAWVEKPTEQDQFSLT

SEQ ID NO: 16 - protein, 385 aa, Artificial
  Synthetic hADAR2dd R470D E488Q
QLHLPQVLADAVSRLVLGKFGDLTDNFSSPHARRKVLAGVVMTTGTDVKDAKVISVSTGTKCINGEYMSDRGLALNDCHAEIISRRSLLRFLYTQLELYLNNKDDQKRSIFQKSERGGFRLKENVQFHLYISTSPCGDARIFSPHEPILEEPADDHPNRKARGQLRTKIESGQGTIPVRSNASIQTWDGVLQGERLLTMSCSDKIARWNVVGIQGSLLSIFVEPIYFSSIILGSLYHGDHLSRAMYQRISNIEDLPPLYTLNKPLLSGISNAEARQPGKAPNFSVNWTVGDSAIEVINATTGKDELGRASRLCKHALYCRWMRVHGKVPSHLLRSKITKPNVYHESKLAAKEYQAAKARLFTAFIKAGLGAWVEKPTEQDQFSLT

SEQ ID NO: 17 - protein, 385 aa, Artificial
  Synthetic hADAR2dd H471A E488Q
QLHLPQVLADAVSRLVLGKFGDLTDNFSSPHARRKVLAGVVMTTGTDVKDAKVISVSTGTKCINGEYMSDRGLALNDCHAEIISRRSLLRFLYTQLELYLNNKDDQKRSIFQKSERGGFRLKENVQFHLYISTSPCGDARIFSPHEPILEEPADRAPNRKARGQLRTKIESGQGTIPVRSNASIQTWDGVLQGERLLTMSCSDKIARWNVVGIQGSLLSIFVEPIYFSSIILGSLYHGDHLSRAMYQRISNIEDLPPLYTLNKPLLSGISNAEARQPGKAPNFSVNWTVGDSAIEVINATTGKDELGRASRLCKHALYCRWMRVHGKVPSHLLRSKITKPNVYHESKLAAKEYQAAKARLFTAFIKAGLGAWVEKPTEQDQFSLT

SEQ ID NO: 18 - protein, 385 aa, Artificial
  Synthetic hADAR2dd N473G E488Q
QLHLPQVLADAVSRLVLGKFGDLTDNFSSPHARRKVLAGVVMTTGTDVKDAKVISVSTGTKCINGEYMSDRGLALNDCHAEIISRRSLLRFLYTQLELYLNNKDDQKRSIFQKSERGGFRLKENVQFHLYISTSPCGDARIFSPHEPILEEPADRHPGRKARGQLRTKIESGQGTIPVRSNASIQTWDGVLQGERLLTMSCSDKIARWNVVGIQGSLLSIFVEPIYFSSIILGSLYHGDHLSRAMYQRISNIEDLPPLYTLNKPLLSGISNAEARQPGKAPNFSVNWTVGDSAIEVINATTGKDELGRASRLCKHALYCRWMRVHGKVPSHLLRSKITKPNVYHESKLAAKEYQAAKARLFTAFIKAGLGAWVEKPTEQDQFSLT

SEQ ID NO: 19 - protein, 385 aa, Artificial
  Synthetic hADAR2dd N473L E488Q
QLHLPQVLADAVSRLVLGKFGDLTDNFSSPHARRKVLAGVVMTTGTDVKDAKVISVSTGTKCINGEYMSDRGLALNDCHAEIISRRSLLRFLYTQLELYLNNKDDQKRSIFQKSERGGFRLKENVQFHLYISTSPCGDARIFSPHEPILEEPADRHPLRKARGQLRTKIESGQGTIPVRSNASIQTWDGVLQGERLLTMSCSDKIARWNVVGIQGSLLSIFVEPIYFSSIILGSLYHGDHLSRAMYQRISNIEDLPPLYTLNKPLLSGISNAEARQPGKAPNFSVNWTVGDSAIEVINATTGKDELGRASRLCKHALYCRWMRVHGKVPSHLLRSKITKPNVYHESKLAAKEYQAAKARLFTAFIKAGLGAWVEKPTEQDQFSLT

SEQ ID NO: 20 - protein, 385 aa, Artificial
  Synthetic hADAR2dd N474A E488Q
QLHLPQVLADAVSRLVLGKFGDLTDNFSSPHARRKVLAGVVMTTGTDVKDAKVISVSTGTKCINGEYMSDRGLALNDCHAEIISRRSLLRFLYTQLELYLNNKDDQKRSIFQKSERGGFRLKENVQFHLYISTSPCGDARIFSPHEPILEEPADRHPNAKARGQLRTKIESGQGTIPVRSNASIQTWDGVLQGERLLTMSCSDKIARWNVVGIQGSLLSIFVEPIYFSSIILGSLYHGDHLSRAMYQRISNIEDLPPLYTLNKPLLSGISNAEARQPGKAPNFSVNWTVGDSAIEVINATTGKDELGRASRLCKHALYCRWMRVHGKVPSHLLRSKITKPNVYHESKLAAKEYQAAKARLFTAFIKAGLGAWVEKPTEQDQFSLT

SEQ ID NO: 21 - protein, 385 aa, Artificial
  Synthetic hADAR2dd N474D E488Q
QLHLPQVLADAVSRLVLGKFGDLTDNFSSPHARRKVLAGVVMTTGTDVKDAKVISVSTGTKCINGEYMSDRGLALNDCHAEIISRRSLLRFLYTQLELYLNNKDDQKRSIFQKSERGGFRLKENVQFHLYISTSPCGDARIFSPHEPILEEPADRHPNDKARGQLRTKIESGQGTIPVRSNASIQTWDGVLQGERLLTMSCSDKIARWNVVGIQGSLLSIFVEPIYFSSIILGSLYHGDHLSRAMYQRISNIEDLPPLYTLNKPLLSGISNAEARQPGKAPNFSVNWTVGDSAIEVINATTGKDELGRASRLCKHALYCRWMRVHGKVPSHLLRSKITKPNVYHESKLAAKEYQAAKARLFTAFIKAGLGAWVEKPTEQDQFSLT

SEQ ID NO: 22 - protein, 385 aa, Artificial
  Synthetic hADAR2dd K475A E488Q
QLHLPQVLADAVSRLVLGKFGDLTDNFSSPHARRKVLAGVVMTTGTDVKDAKVISVSTGTKCINGEYMSDRGLALNDCHAEIISRRSLLRFLYTQLELYLNNKDDQKRSIFQKSERGGFRLKENVQFHLYISTSPCGDARIFSPHEPILEEPADRHPNRAARGQLRTKIESGQGTIPVRSNASIQTWDGVLQGERLLTMSCSDKIARWNVVGIQGSLLSIFVEPIYFSSIILGSLYHGDHLSRAMYQRISNIEDLPPLYTLNKPLLSGISNAEARQPGKAPNFSVNWTVGDSAIEVINATTGKDELGRASRLCKHALYCRWMRVHGKVPSHLLRSKITKPNVYHESKLAAKEYQAAKARLFTAFIKAGLGAWVEKPTEQDQFSLT

SEQ ID NO: 23 - protein, 385 aa, Artificial
  Synthetic hADAR2dd K475D E488Q
QLHLPQVLADAVSRLVLGKFGDLTDNFSSPHARRKVLAGVVMTTGTDVKDAKVISVSTGTKCINGEYMSDRGLALNDCHAEIISRRSLLRFLYTQLELYLNNKDDQKRSIFQKSERGGFRLKENVQFHLYISTSPCGDARIFSPHEPILEEPADRHPNRDARGQLRTKIESGQGTIPVRSNASIQTWDGVLQGERLLTMSCSDKIARWNVVGIQGSLLSIFVEPIYFSSIILGSLYHGDHLSRAMYQRISNIEDLPPLYTLNKPLLSGISNAEARQPGKAPNFSVNWTVGDSAIEVINATTGKDELGRASRLCKHALYCRWMRVHGKVPSHLLRSKITKPNVYHESKLAAKEYQAAKARLFTAFIKAGLGAWVEKPTEQDQFSLT

SEQ ID NO: 24 - protein, 385 aa, Artificial
  Synthetic hADAR2dd K475E E488Q
QLHLPQVLADAVSRLVLGKFGDLTDNFSSPHARRKVLAGVVMTTGTDVKDAKVISVSTGTKCINGEYMSDRGLALNDCHAEIISRRSLLRFLYTQLELYLNNKDDQKRSIFQKSERGGFRLKENVQFHLYISTSPCGDARIFSPHEPILEEPADRHPNREARGQLRTKIESGQGTIPVRSNASIQTWDGVLQGERLLTMSCSDKIARWNVVGIQGSLLSIFVEPIYFSSIILGSLYHGDHLSRAMYQRISNIEDLPPLYTLNKPLLSGISNAEARQPGKAPNFSVNWTVGDSAIEVINATTGKDELGRASRLCKHALYCRWMRVHGKVPSHLLRSKITKPNVYHESKLAAKEYQAAKARLFTAFIKAGLGAWVEKPTEQDQFSLT

SEQ ID NO: 25 - protein, 385 aa, Artificial
  Synthetic hADAR2dd K475L E488Q
QLHLPQVLADAVSRLVLGKFGDLTDNFSSPHARRKVLAGVVMTTGTDVKDAKVISVSTGTKCINGEYMSDRGLALNDCHAEIISRRSLLRFLYTQLELYLNNKDDQKRSIFQKSERGGFRLKENVQFHLYISTSPCGDARIFSPHEPILEEPADRHPNRLARGQLRTKIESGQGTIPVRSNASIQTWDGVLQGERLLTMSCSDKIARWNVVGIQGSLLSIFVEPIYFSSIILGSLYHGDHLSRAMYQRISNIEDLPPLYTLNKPLLSGISNAEARQPGKAPNFSVNWTVGDSAIEVINATTGKDELGRASRLCKHALYCRWMRVHGKVPSHLLRSKITKPNVYHESKLAAKEYQAAKARLFTAFIKAGLGAWVEKPTEQDQFSLT

SEQ ID NO: 26 - protein, 385 aa, Artificial
  Synthetic hADAR2dd R477A E488Q
QLHLPQVLADAVSRLVLGKFGDLTDNFSSPHARRKVLAGVVMTTGTDVKDAKVISVSTGTKCINGEYMSDRGLALNDCHAEIISRRSLLRFLYTQLELYLNNKDDQKRSIFQKSERGGFRLKENVQFHLYISTSPCGDARIFSPHEPILEEPADRHPNRKAAGQLRTKIESGQGTIPVRSNASIQTWDGVLQGERLLTMSCSDKIARWNVVGIQGSLLSIFVEPIYFSSIILGSLYHGDHLSRAMYQRISNIEDLPPLYTLNKPLLSGISNAEARQPGKAPNFSVNWTVGDSAIEVINATTGKDELGRASRLCKHALYCRWMRVHGKVPSHLLRSKITKPNVYHESKLAAKEYQAAKARLFTAFIKAGLGAWVEKPTEQDQFSLT

SEQ ID NO: 27 - protein, 385 aa, Artificial
  Synthetic hADAR2dd Q479L E488Q
QLHLPQVLADAVSRLVLGKFGDLTDNFSSPHARRKVLAGVVMTTGTDVKDAKVISVSTGTKCINGEYMSDRGLALNDCHAEIISRRSLLRFLYTQLELYLNNKDDQKRSIFQKSERGGFRLKENVQFHLYISTSPCGDARIFSPHEPILEEPADRHPNRKARGLLRTKIESGQGTIPVRSNASIQTWDGVLQGERLLTMSCSDKIARWNVVGIQGSLLSIFVEPIYFSSIILGSLYHGDHLSRAMYQRISNIEDLPPLYTLNKPLLSGISNAEARQPGKAPNFSVNWTVGDSAIEVINATTGKDELGRASRLCKHALYCRWMRVHGKVPSHLLRSKITKPNVYHESKLAAKEYQAAKARLFTAFIKAGLGAWVEKPTEQDQFSLT

SEQ ID NO: 28 - protein, 385 aa, Artificial
  Synthetic hADAR2dd Q479V E488Q
QLHLPQVLADAVSRLVLGKFGDLTDNFSSPHARRKVLAGVVMTTGTDVKDAKVISVSTGTKCINGEYMSDRGLALNDCHAEIISRRSLLRFLYTQLELYLNNKDDQKRSIFQKSERGGFRLKENVQFHLYISTSPCGDARIFSPHEPILEEPADRHPNRKARGVLRTKIESGQGTIPVRSNASIQTWDGVLQGERLLTMSCSDKIARWNVVGIQGSLLSIFVEPIYFSSIILGSLYHGDHLSRAMYQRISNIEDLPPLYTLNKPLLSGISNAEARQPGKAPNFSVNWTVGDSAIEVINATTGKDELGRASRLCKHALYCRWMRVHGKVPSHLLRSKITKPNVYHESKLAAKEYQAAKARLFTAFIKAGLGAWVEKPTEQDQFSLT

SEQ ID NO: 29 - protein, 385 aa, Artificial
  Synthetic hADAR2dd M25
QLHLPQVLADAVSRLVLGKFGDLTDNFSSPHAARKLLAGVVMTTGTDVKDAKVISVSTGTKCINGEYMSDRGLALNDCHAEIISRRSLLRFLYTQLELYLNNKDDQKRSIFQKSERGGFRLKENVQFHLYISTSPCGDARIFSPHEPILEEPADRHPNRKARGQLRTKIESGQGTIPVRSNASIQTWDGVLQGERLLTMSCSDKIARWNVVGIQGSLLSIFVEPIYFSSIILGSLYHGDHLSRAMYQRISNIEDLPPLYTLNKPLLSGISNAEARQPGKAPNFSVNWTVGDSAIEVINATTGKDELGRASRLCKHALYCRWMRVHGKVPSHLLRSKITKPNVYHESKLAAKEYQAAKARLFTAFIKAGLGAWVEKPTEQDQFSLT

SEQ ID NO: 30 - protein, 385 aa, Artificial
  Synthetic hADAR2dd M26
QLHLPQVLADAVSRLVLGKFGDLTDNFSSPHAERKLLAGVVMTTGTDVKDAKVISVSTGTKCINGEYMSDRGLALNDCHAEIISRRSLLRFLYTQLELYLNNKDDQKRSIFQKSERGGFRLKENVQFHLYISTSPCGDARIFSPHEPILEEPADRHPNRKARGQLRTKIESGQGTIPVRSNASIQTWDGVLQGERLLTMSCSDKIARWNVVGIQGSLLSIFVEPIYFSSIILGSLYHGDHLSRAMYQRISNIEDLPPLYTLNKPLLSGISNAEARQPGKAPNFSVNWTVGDSAIEVINATTGKDELGRASRLCKHALYCRWMRVHGKVPSHLLRSKITKPNVYHESKLAAKEYQAAKARLFTAFIKAGLGAWVEKPTEQDQFSLT

SEQ ID NO: 31 - protein, 385 aa, Artificial
  Synthetic hADAR2dd M27
QLHLPQVLADAVSRLVLGKFGDLTDNFSSPHARGKVLAGVVMTTGTDVKDAKVISVSTGTKCINGEYMSDRGLALNDCHAEIISRRSLLRFLYTQLELYLNNKDDQKRSIFQKSERGGFRLKENVQFHLYISTSPCGDARIFSPHEPILEEPADRHPNRDARGQLRTKIESGQGTIPVRSNASIQTWDGVLQGERLLTMSCSDKIARWNVVGIQGSLLSIFVEPIYFSSIILGSLYHGDHLSRAMYQRISNIEDLPPLYTLNKPLLSGISNAEARQPGKAPNFSVNWTVGDSAIEVINATTGKDELGRASRLCKHALYCRWMRVHGKVPSHLLRSKITKPNVYHESKLAAKEYQAAKARLFTAFIKAGLGAWVEKPTEQDQFSLT

SEQ ID NO: 32 - protein, 385 aa, Artificial
  Synthetic hADAR2dd M28
QLHLPQVLADAVSRLVLGKFGDLTDNFSSPHARRKVLAGVVMTTGTDVKDAKVISVSTGTKCINGEYMSDRGLALNDCHAEIISRRSLLRFLYTQLELYLNNKDDQKRSIFQKSERGGFRLKENVQFHLYISTSPCGDAAIFAPHEPILEEPADRHPNRKARGQLRTKIESGQGTIPVRSNASIQTWDGVLQGERLLTMSCSDKIARWNVVGIQGSLLSIFVEPIYFSSIILGSLYHGDHLSRAMYQRISNIEDLPPLYTLNKPLLSGISNAEARQPGKAPNFSVNWTVGDSAIEVINATTGKDELGRASRLCKHALYCRWMRVHGKVPSHLLRSKITKPNVYHESKLAAKEYQAAKARLFTAFIKAGLGAWVEKPTEQDQFSLT

SEQ ID NO: 33 - protein, 385 aa, Artificial
  Synthetic hADAR2dd M29
QLHLPQVLADAVSRLVLGKFGDLTDNFSSPHARRKVLAGVVMTTGTDVKDAKVISVSTGTKCINGEYMSDRGLALNDCHAEIISRRSLLRFLYTQLELYLNNKDDQKRSIFQKSERGGFRLKENVQFHLYISTSPCGDAGIFAPHEPILEEPADRHPNRKARGQLRTKIESGQGTIPVRSNASIQTWDGVLQGERLLTMSCSDKIARWNVVGIQGSLLSIFVEPIYFSSIILGSLYHGDHLSRAMYQRISNIEDLPPLYTLNKPLLSGISNAEARQPGKAPNFSVNWTVGDSAIEVINATTGKDELGRASRLCKHALYCRWMRVHGKVPSHLLRSKITKPNVYHESKLAAKEYQAAKARLFTAFIKAGLGAWVEKPTEQDQFSLT

SEQ ID NO: 34 - protein, 385 aa, Artificial
  Synthetic hADAR2dd M30
QLHLPQVLADAVSRLVLGKFGDLTDNFSSPHARRKVLAGVVMTTGTDVKDAKVISVSTGTKCINGEYMSDRGLALNDCHAEIISRRSLLRFLYTQLELYLNNKDDQKRSIFQKSERGGFRLKENVQFHLYISTSPCGDARIFSPDEPILEEPADAHPNRKARGQLRTKIESGQGTIPVRSNASIQTWDGVLQGERLLTMSCSDKIARWNVVGIQGSLLSIFVEPIYFSSIILGSLYHGDHLSRAMYQRISNIEDLPPLYTLNKPLLSGISNAEARQPGKAPNFSVNWTVGDSAIEVINATTGKDELGRASRLCKHALYCRWMRVHGKVPSHLLRSKITKPNVYHESKLAAKEYQAAKARLFTAFIKAGLGAWVEKPTEQDQFSLT

SEQ ID NO: 35 - protein, 385 aa, Artificial
  Synthetic hADAR2dd M31
QLHLPQVLADAVSRLVLGKFGDLTDNFSSPHARRKVLAGVVMTTGTDVKDAKVISVSTGTKCINGEYMSDRGLALNDCHAEIISRRSLLRFLYTQLELYLNNKDDQKRSIFQKSERGGFRLKENVQFHLYISTSPCGDARIFSPDEPILEEPADRHPNDKARGQLRTKIESGQGTIPVRSNASIQTWDGVLQGERLLTMSCSDKIARWNVVGIQGSLLSIFVEPIYFSSIILGSLYHGDHLSRAMYQRISNIEDLPPLYTLNKPLLSGISNAEARQPGKAPNFSVNWTVGDSAIEVINATTGKDELGRASRLCKHALYCRWMRVHGKVPSHLLRSKITKPNVYHESKLAAKEYQAAKARLFTAFIKAGLGAWVEKPTEQDQFSLT

SEQ ID NO: 36 - protein, 385 aa, Artificial
  Synthetic hADAR2dd M32
QLHLPQVLADAVSRLVLGKFGDLTDNFSSPHARRKVLAGVVMTTGTDVKDAKVISVSTGTKCINGEYMSDRGLALNDCHAEIISRRSLLRFLYTQLELYLNNKDDQKRSIFQKSERGGFRLKENVQFHLYISTSPCGDARIFSPDEPILEEPADRHPNRDARGQLRTKIESGQGTIPVRSNASIQTWDGVLQGERLLTMSCSDKIARWNVVGIQGSLLSIFVEPIYFSSIILGSLYHGDHLSRAMYQRISNIEDLPPLYTLNKPLLSGISNAEARQPGKAPNFSVNWTVGDSAIEVINATTGKDELGRASRLCKHALYCRWMRVHGKVPSHLLRSKITKPNVYHESKLAAKEYQAAKARLFTAFIKAGLGAWVEKPTEQDQFSLT

SEQ ID NO: 37 - protein, 385 aa, Artificial
  Synthetic hADAR2dd M33
QLHLPQVLADAVSRLVLGKFGDLTDNFSSPHARRKVLAGVVMTTGTDVKDAKVISVSTGTKCINGEYMSDRGLALNDCHAEIISRRSLLRFLYTQLELYLNNKDDQKRSIFQKSERGGFRLKENVQFHLYISTSPCGDARIFSPHEPILEEPADAHPGRKARGQLRTKIESGQGTIPVRSNASIQTWDGVLQGERLLTMSCSDKIARWNVVGIQGSLLSIFVEPIYFSSIILGSLYHGDHLSRAMYQRISNIEDLPPLYTLNKPLLSGISNAEARQPGKAPNFSVNWTVGDSAIEVINATTGKDELGRASRLCKHALYCRWMRVHGKVPSHLLRSKITKPNVYHESKLAAKEYQAAKARLFTAFIKAGLGAWVEKPTEQDQFSLT

SEQ ID NO: 38 - protein, 385 aa, Artificial
  Synthetic hADAR2dd M34
QLHLPQVLADAVSRLVLGKFGDLTDNFSSPHARRKVLAGVVMTTGTDVKDAKVISVSTGTKCINGEYMSDRGLALNDCHAEIISRRSLLRFLYTQLELYLNNKDDQKRSIFQKSERGGFRLKENVQFHLYISTSPCGDARIFSPHEPILEEPADAHPNRDARGQLRTKIESGQGTIPVRSNASIQTWDGVLQGERLLTMSCSDKIARWNVVGIQGSLLSIFVEPIYFSSIILGSLYHGDHLSRAMYQRISNIEDLPPLYTLNKPLLSGISNAEARQPGKAPNFSVNWTVGDSAIEVINATTGKDELGRASRLCKHALYCRWMRVHGKVPSHLLRSKITKPNVYHESKLAAKEYQAAKARLFTAFIKAGLGAWVEKPTEQDQFSLT

SEQ ID NO: 39 - protein, 385 aa, Artificial
  Synthetic hADAR2dd M35
QLHLPQVLADAVSRLVLGKFGDLTDNFSSPHARRKVLAGVVMTTGTDVKDAKVISVSTGTKCINGEYMSDRGLALNDCHAEIISRRSLLRFLYTQLELYLNNKDDQKRSIFQKSERGGFRLKENVQFHLYISTSPCGDARIFSPHEPILEEPADRHPGRAARGQLRTKIESGQGTIPVRSNASIQTWDGVLQGERLLTMSCSDKIARWNVVGIQGSLLSIFVEPIYFSSIILGSLYHGDHLSRAMYQRISNIEDLPPLYTLNKPLLSGISNAEARQPGKAPNFSVNWTVGDSAIEVINATTGKDELGRASRLCKHALYCRWMRVHGKVPSHLLRSKITKPNVYHESKLAAKEYQAAKARLFTAFIKAGLGAWVEKPTEQDQFSLT

SEQ ID NO: 40 - protein, 385 aa, Artificial
  Synthetic hADAR2dd M36
QLHLPQVLADAVSRLVLGKFGDLTDNFSSPHARRKVLAGVVMTTGTDVKDAKVISVSTGTKCINGEYMSDRGLALNDCHAEIISRRSLLRFLYTQLELYLNNKDDQKRSIFQKSERGGFRLKENVQFHLYISTSPCGDARIFSPHEPILEEPADRHPGRLARGQLRTKIESGQGTIPVRSNASIQTWDGVLQGERLLTMSCSDKIARWNVVGIQGSLLSIFVEPIYFSSIILGSLYHGDHLSRAMYQRISNIEDLPPLYTLNKPLLSGISNAEARQPGKAPNFSVNWTVGDSAIEVINATTGKDELGRASRLCKHALYCRWMRVHGKVPSHLLRSKITKPNVYHESKLAAKEYQAAKARLFTAFIKAGLGAWVEKPTEQDQFSLT

SEQ ID NO: 41 - protein, 385 aa, Artificial
  Synthetic hADAR2dd M37
QLHLPQVLADAVSRLVLGKFGDLTDNFSSPHARRKVLAGVVMTTGTDVKDAKVISVSTGTKCINGEYMSDRGLALNDCHAEIISRRSLLRFLYTQLELYLNNKDDQKRSIFQKSERGGFRLKENVQFHLYISTSPCGDARIFSPHEPILEEPADRHPGRKARGLLRTKIESGQGTIPVRSNASIQTWDGVLQGERLLTMSCSDKIARWNVVGIQGSLLSIFVEPIYFSSIILGSLYHGDHLSRAMYQRISNIEDLPPLYTLNKPLLSGISNAEARQPGKAPNFSVNWTVGDSAIEVINATTGKDELGRASRLCKHALYCRWMRVHGKVPSHLLRSKITKPNVYHESKLAAKEYQAAKARLFTAFIKAGLGAWVEKPTEQDQFSLT

SEQ ID NO: 42 - protein, 385 aa, Artificial
  Synthetic hADAR2dd M38
QLHLPQVLADAVSRLVLGKFGDLTDNFSSPHARRKVLAGVVMTTGTDVKDAKVISVSTGTKCINGEYMSDRGLALNDCHAEIISRRSLLRFLYTQLELYLNNKDDQKRSIFQKSERGGFRLKENVQFHLYISTSPCGDARIFSPHEPILEEPADRHPNDAARGQLRTKIESGQGTIPVRSNASIQTWDGVLQGERLLTMSCSDKIARWNVVGIQGSLLSIFVEPIYFSSIILGSLYHGDHLSRAMYQRISNIEDLPPLYTLNKPLLSGISNAEARQPGKAPNFSVNWTVGDSAIEVINATTGKDELGRASRLCKHALYCRWMRVHGKVPSHLLRSKITKPNVYHESKLAAKEYQAAKARLFTAFIKAGLGAWVEKPTEQDQFSLT

SEQ ID NO: 43 - protein, 385 aa, Artificial
  Synthetic hADAR2dd M39
QLHLPQVLADAVSRLVLGKFGDLTDNFSSPHARRKVLAGVVMTTGTDVKDAKVISVSTGTKCINGEYMSDRGLALNDCHAEIISRRSLLRFLYTQLELYLNNKDDQKRSIFQKSERGGFRLKENVQFHLYISTSPCGDARIFSPHEPILEEPADRHPNRDARGLLRTKIESGQGTIPVRSNASIQTWDGVLQGERLLTMSCSDKIARWNVVGIQGSLLSIFVEPIYFSSIILGSLYHGDHLSRAMYQRISNIEDLPPLYTLNKPLLSGISNAEARQPGKAPNFSVNWTVGDSAIEVINATTGKDELGRASRLCKHALYCRWMRVHGKVPSHLLRSKITKPNVYHESKLAAKEYQAAKARLFTAFIKAGLGAWVEKPTEQDQFSLT

SEQ ID NO: 44 - protein, 385 aa, Artificial
  Synthetic hADAR2dd M40
QLHLPQVLADAVSRLVLGKFGDLTDNFSSPHARRKVLAGVVMTTGTDVKDAKVISVSTGTKCINGEYMSDRGLALNDCHAEIISRRSLLRFLYTQLELYLNNKDDQKRSIFQKSERGGFRLKENVQFHLYISTSPCGDAAIFAPHEPILEEPADRHPNRDARGQLRTKIESGQGTIPVRSNASIQTWDGVLQGERLLTMSCSDKIARWNVVGIQGSLLSIFVEPIYFSSIILGSLYHGDHLSRAMYQRISNIEDLPPLYTLNKPLLSGISNAEARQPGKAPNFSVNWTVGDSAIEVINATTGKDELGRASRLCKHALYCRWMRVHGKVPSHLLRSKITKPNVYHESKLAAKEYQAAKARLFTAFIKAGLGAWVEKPTEQDQFSLT

SEQ ID NO: 45 - protein, 385 aa, Artificial
  Synthetic hADAR2dd M41
QLHLPQVLADAVSRLVLGKFGDLTDNFSSPHARRKVLAGVVMTTGTDVKDAKVISVSTGTKCINGEYMSDRGLALNDCHAEIISRRSLLRFLYTQLELYLNNKDDQKRSIFQKSERGGFRLKENVQFHLYISTSPCGDARIFSPDEPILEEPADAHPGRKARGQLRTKIESGQGTIPVRSNASIQTWDGVLQGERLLTMSCSDKIARWNVVGIQGSLLSIFVEPIYFSSIILGSLYHGDHLSRAMYQRISNIEDLPPLYTLNKPLLSGISNAEARQPGKAPNFSVNWTVGDSAIEVINATTGKDELGRASRLCKHALYCRWMRVHGKVPSHLLRSKITKPNVYHESKLAAKEYQAAKARLFTAFIKAGLGAWVEKPTEQDQFSLT

SEQ ID NO: 46 - protein, 385 aa, Artificial
  Synthetic hADAR2dd M42
QLHLPQVLADAVSRLVLGKFGDLTDNFSSPHARRKVLAGVVMTTGTDVKDAKVISVSTGTKCINGEYMSDRGLALNDCHAEIISRRSLLRFLYTQLELYLNNKDDQKRSIFQKSERGGFRLKENVQFHLYISTSPCGDARIFSPDEPILEEPADRHPGRLARGQLRTKIESGQGTIPVRSNASIQTWDGVLQGERLLTMSCSDKIARWNVVGIQGSLLSIFVEPIYFSSIILGSLYHGDHLSRAMYQRISNIEDLPPLYTLNKPLLSGISNAEARQPGKAPNFSVNWTVGDSAIEVINATTGKDELGRASRLCKHALYCRWMRVHGKVPSHLLRSKITKPNVYHESKLAAKEYQAAKARLFTAFIKAGLGAWVEKPTEQDQFSLT

SEQ ID NO: 47 - protein, 385 aa, Artificial
  Synthetic hADAR2dd M43
QLHLPQVLADAVSRLVLGKFGDLTDNFSSPHARRKVLAGVVMTTGTDVKDAKVISVSTGTKCINGEYMSDRGLALNDCHAEIISRRSLLRFLYTQLELYLNNKDDQKRSIFQKSERGGFRLKENVQFHLYISTSPCGDARIFSPHEPILEEPADAHPGRLARGQLRTKIESGQGTIPVRSNASIQTWDGVLQGERLLTMSCSDKIARWNVVGIQGSLLSIFVEPIYFSSIILGSLYHGDHLSRAMYQRISNIEDLPPLYTLNKPLLSGISNAEARQPGKAPNFSVNWTVGDSAIEVINATTGKDELGRASRLCKHALYCRWMRVHGKVPSHLLRSKITKPNVYHESKLAAKEYQAAKARLFTAFIKAGLGAWVEKPTEQDQFSLT

SEQ ID NO: 48 - protein, 385 aa, Artificial
  Synthetic hADAR2dd M44
QLHLPQVLADAVSRLVLGKFGDLTDNFSSPHARRKVLAGVVMTTGTDVKDAKVISVSTGTKCINGEYMSDRGLALNDCHAEIISRRSLLRFLYTQLELYLNNKDDQKRSIFQKSERGGFRLKENVQFHLYISTSPCGDARIFSPHEPILEEPADRHPGDAARGQLRTKIESGQGTIPVRSNASIQTWDGVLQGERLLTMSCSDKIARWNVVGIQGSLLSIFVEPIYFSSIILGSLYHGDHLSRAMYQRISNIEDLPPLYTLNKPLLSGISNAEARQPGKAPNFSVNWTVGDSAIEVINATTGKDELGRASRLCKHALYCRWMRVHGKVPSHLLRSKITKPNVYHESKLAAKEYQAAKARLFTAFIKAGLGAWVEKPTEQDQFSLT

SEQ ID NO: 49 - protein, 385 aa, Artificial
  Synthetic hADAR2dd M45
QLHLPQVLADAVSRLVLGKFGDLTDNFSSPHARRKVLAGVVMTTGTDVKDAKVISVSTGTKCINGEYMSDRGLALNDCHAEIISRRSLLRFLYTQLELYLNNKDDQKRSIFQKSERGGFRLKENVQFHLYISTSPCGDARIFSPHEPILEEPADAHPGDAARGQLRTKIESGQGTIPVRSNASIQTWDGVLQGERLLTMSCSDKIARWNVVGIQGSLLSIFVEPIYFSSIILGSLYHGDHLSRAMYQRISNIEDLPPLYTLNKPLLSGISNAEARQPGKAPNFSVNWTVGDSAIEVINATTGKDELGRASRLCKHALYCRWMRVHGKVPSHLLRSKITKPNVYHESKLAAKEYQAAKARLFTAFIKAGLGAWVEKPTEQDQFSLT

SEQ ID NO: 50 - protein, 967 aa, Artificial
  Synthetic dCasRx
MIEKKKSFAKGMGVKSTLVSGSKVYMTTFAEGSDARLEKIVEGDSIRSVNEGEAFSAEMADKNAGYKIGNAKFSHPKGYAVVANNPLYTGPVQQDMLGLKETLEKRYFGESADGNDNICIQVIHNILDIEKILAEYITNAAYAVNNISGLDKDIIGFGKFSTVYTYDEFKDPEHHRAAFNNNDKLINAIKAQYDEFDNFLDNPRLGYFGQAFFSKEGRNYIINYGNECYDILALLSGLAHWVVANNEEESRISRTWLYNLDKNLDNEYISTLNYLYDRITNELTNSFSKNSAANVNYIAETLGINPAEFAEQYFRFSIMKEQKNLGFNITKLREVMLDRKDMSEIRKNHKVFDSIRTKVYTMMDFVIYRYYIEEDAKVAAANKSLPDNEKSLSEKDIFVINLRGSFNDDQKDALYYDEANRIWRKLENIMHNIKEFRGNKTREYKKKDAPRLPRILPAGRDVSAFSKLMYALTMFLDGKEINDLLTTLINKFDNIQSFLKVMPLIGVNAKFVEEYAFFKDSAKIADELRLIKSFARMGEPIADARRAMYIDAIRILGTNLSYDELKALADTFSLDENGNKLKKGKHGMRNFIINNVISNKRFHYLIRYGDPAHLHEIAKNEAVVKFVLGRIADIQKKQGQNGKNQIDRYYETCIGKDKGKSVSEKVDALTKIITGMNYDQFDKKRSVIEDTGRENAEREKFKKIISLYLTVIYHILKNIVNINARYVIGFHCVERDAQLYKEKGYDINLKKLEEKGFSSVTKLCAGIDETAPDKRKDVEKEMAERAKESIDSLESANPKLYANYIKYSDEKKAEEFTRQINREKAKTALNAYLRNTKWNVIIREDLLRIDNKTCTLFANKAVALEVARYVHAYINDIAEVNSYFQLYHYIMQRIIMNERYEKSSGKVSEYFDAVNDEKKYNDRLLKLLCVPFGYCIPRFKNLSIEALFDRNEAAKFDKEKKKVSGNS

SEQ ID NO: 51 - protein, 967 aa, Artificial
  Synthetic dRasRx K942L
MIEKKKSFAKGMGVKSTLVSGSKVYMTTFAEGSDARLEKIVEGDSIRSVNEGEAFSAEMADKNAGYKIGNAKFSHPKGYAVVANNPLYTGPVQQDMLGLKETLEKRYFGESADGNDNICIQVIHNILDIEKILAEYITNAAYAVNNISGLDKDIIGFGKFSTVYTYDEFKDPEHHRAAFNNNDKLINAIKAQYDEFDNFLDNPRLGYFGQAFFSKEGRNYIINYGNECYDILALLSGLAHWVVANNEEESRISRTWLYNLDKNLDNEYISTLNYLYDRITNELTNSFSKNSAANVNYIAETLGINPAEFAEQYFRFSIMKEQKNLGFNITKLREVMLDRKDMSEIRKNHKVFDSIRTKVYTMMDFVIYRYYIEEDAKVAAANKSLPDNEKSLSEKDIFVINLRGSFNDDQKDALYYDEANRIWRKLENIMHNIKEFRGNKTREYKKKDAPRLPRILPAGRDVSAFSKLMYALTMFLDGKEINDLLTTLINKFDNIQSFLKVMPLIGVNAKFVEEYAFFKDSAKIADELRLIKSFARMGEPIADARRAMYIDAIRILGTNLSYDELKALADTFSLDENGNKLKKGKHGMRNFIINNVISNKRFHYLIRYGDPAHLHEIAKNEAVVKFVLGRIADIQKKQGQNGKNQIDRYYETCIGKDKGKSVSEKVDALTKIITGMNYDQFDKKRSVIEDTGRENAEREKFKKIISLYLTVIYHILKNIVNINARYVIGFHCVERDAQLYKEKGYDINLKKLEEKGFSSVTKLCAGIDETAPDKRKDVEKEMAERAKESIDSLESANPKLYANYIKYSDEKKAEEFTRQINREKAKTALNAYLRNTKWNVIIREDLLRIDNKTCTLFANKAVALEVARYVHAYINDIAEVNSYFQLYHYIMQRIIMNERYEKSSGKVSEYFDAVNDEKKYNDRLLKLLCVPFGYCIPRFLNLSIEALFDRNEAAKFDKEKKKVSGNS

SEQ ID NO: 52 - protein, 1090 aa, Artificial
  Synthetic dCas13b
MNIPALVENQKKYFGTYSVMAMLNAQTVLDHIQKVADIEGEQNENNENLWFHPVMSHLYNAKNGYDKQPEKTMFIIERLQSYFPFLKIMAENQREYSNGKYKQNRVEVNSNDIFEVLKRAFGVLKMYRDLTNAYKTYEEKLNDGCEFLTSTEQPLSGMINNYYTVALRNMNERYGYKTEDLAFIQDKRFKFVKDAYGKKKSQVNTGFFLSLQDYNGDTQKKLHLSGVGIALLICLFLDKQYINIFLSRLPIFSSYNAQSEERRIIIRSFGINSIKLPKDRIHSEKSNKSVAMDMLNEVKRCPDELFTTLSAEKQSRFRIISDDHNEVLMKRSSDRFVPLLLQYIDYGKLFDHIRFHVNMGKLRYLLKADKTCIDGQTRVRVIEQPLNGFGRLEEAETMRKQENGTFGNSGIRIRDFENMKRDDANPANYPYIVDTYTHYILENNKVEMFINDKEDSAPLLPVIEDDRYVVKTIPSCRMSTLEIPAMAFHMFLFGSKKTEKLIVDVHNRYKRLFQAMQKEEVTAENIASFGIAESDLPQKILDLISGNAHGKDVDAFIRLTVDDMLTDTERRIKRFKDDRKSIRSADNKMGKRGFKQISTGKLADFLAKDIVLFQPSVNDGENKITGLNYRIMQSAIAVYDSGDDYEAKQQFKLMFEKARLIGKGTTEPHPFLYKVFARSIPANAVEFYERYLIERKFYLTGLSNEIKKGNRVDVPFIRRDQNKWKTPAMKTLGRIYSEDLPVELPRQMFDNEIKSHLKSLPQMEGIDFNNANVTYLIAEYMKRVLDDDFQTFYQWNRNYRYMDMLKGEYDRKGSLQHCFTSVEEREGLWKERASRTERYRKQASNKIRSNRQMRNASSEEIETILDKRLSNSRNEYQKSEKVIRRYRVQDALLFLLAKKTLTELADFDGERFKLKEIMPDAEKGILSEIMPMSFTFEKGGKKYTITSEGMKLKNYGDFFVLASDKRIGNLLELVGSDIVSKEDIMEEFNKYDQCRPEISSIVFNLEKWAFDTYPELSARVDREEKVDFKSILKILLNNKNINKEQSDILRKIRNAFDANNYPDKGVVEIKALPEIAMSIKKAFGEYAIMK

SEQ ID NO: 53 - protein, 11 aa, Artificial
  HIV NES sequence
LQLPPLERLTL

SEQ ID NO: 54 - protein, 7 aa, Artificial
  SV40 NLS sequence
PKKKRKV

SEQ ID NO: 55 - protein, 16 aa, Artificial
  XTEN linker sequence
SGSETPGTSESATPES

SEQ ID NO: 56 - protein, 32 aa, Artificial
  GS-XTEN-GS linker sequence
SGGSSGGSSGSETPGTSESATPESSGGSSGGS

SEQ ID NO: 57 - protein, 7 aa, Artificial
  GS linker
GSGGGGS

SEQ ID NO: 58 - protein, 1495 aa, Artificial
  dCas13b-hADAR2dd fusion
MNIPALVENQKKYFGTYSVMAMLNAQTVLDHIQKVADIEGEQNENNENLWFHPVMSHLYNAKNGYDKQPEKTMFIIERLQSYFPFLKIMAENQREYSNGKYKQNRVEVNSNDIFEVLKRAFGVLKMYRDLTNAYKTYEEKLNDGCEFLTSTEQPLSGMINNYYTVALRNMNERYGYKTEDLAFIQDKRFKFVKDAYGKKKSQVNTGFFLSLQDYNGDTQKKLHLSGVGIALLICLFLDKQYINIFLSRLPIFSSYNAQSEERRIIIRSFGINSIKLPKDRIHSEKSNKSVAMDMLNEVKRCPDELFTTLSAEKQSRFRIISDDHNEVLMKRSSDRFVPLLLQYIDYGKLFDHIRFHVNMGKLRYLLKADKTCIDGQTRVRVIEQPLNGFGRLEEAETMRKQENGTFGNSGIRIRDFENMKRDDANPANYPYIVDTYTHYILENNKVEMFINDKEDSAPLLPVIEDDRYVVKTIPSCRMSTLEIPAMAFHMFLFGSKKTEKLIVDVHNRYKRLFQAMQKEEVTAENIASFGIAESDLPQKILDLISGNAHGKDVDAFIRLTVDDMLTDTERRIKRFKDDRKSIRSADNKMGKRGFKQISTGKLADFLAKDIVLFQPSVNDGENKITGLNYRIMQSAIAVYDSGDDYEAKQQFKLMFEKARLIGKGTTEPHPFLYKVFARSIPANAVEFYERYLIERKFYLTGLSNEIKKGNRVDVPFIRRDQNKWKTPAMKTLGRIYSEDLPVELPRQMFDNEIKSHLKSLPQMEGIDFNNANVTYLIAEYMKRVLDDDFQTFYQWNRNYRYMDMLKGEYDRKGSLQHCFTSVEEREGLWKERASRTERYRKQASNKIRSNRQMRNASSEEIETILDKRLSNSRNEYQKSEKVIRRYRVQDALLFLLAKKTLTELADFDGERFKLKEIMPDAEKGILSEIMPMSFTFEKGGKKYTITSEGMKLKNYGDFFVLASDKRIGNLLELVGSDIVSKEDIMEEFNKYDQCRPEISSIVFNLEKWAFDTYPELSARVDREEKVDFKSILKILLNNKNINKEQSDILRKIRNAFDANNYPDKGVVEIKALPEIAMSIKKAFGEYAIMKGSLQLPPLERLTLGSGGGGSQLHLPQVLADAVSRLVLGKFGDLTDNFSSPHARRKVLAGVVMTTGTDVKDAKVISVSTGTKCINGEYMSDRGLALNDCHAEIISRRSLLRFLYTQLELYLNNKDDQKRSIFQKSERGGFRLKENVQFHLYISTSPCGDARIFSPDEPILEEPADRHPNRKARGQLRTKIESGQGTIPVRSNASIQTWDGVLQGERLLTMSCSDKIARWNVVGIQGSLLSIFVEPIYFSSIILGSLYHGDHLSRAMYQRISNIEDLPPLYTLNKPLLSGISNAEARQPGKAPNFSVNWTVGDSAIEVINATTGKDELGRASRLCKHALYCRWMRVHGKVPSHLLRSKITKPNVYHESKLAAKEYQAAKARLFTAFIKAGLGAWVEKPTEQDQFSLT

SEQ ID NO: 59 - protein, 1389 aa, Artificial
  dCasRx-hADAR2dd fusion
MSPKKKRKVEASIEKKKSFAKGMGVKSTLVSGSKVYMTTFAEGSDARLEKIVEGDSIRSVNEGEAFSAEMADKNAGYKIGNAKFSHPKGYAVVANNPLYTGPVQQDMLGLKETLEKRYFGESADGNDNICIQVIHNILDIEKILAEYITNAAYAVNNISGLDKDIIGFGKFSTVYTYDEFKDPEHHRAAFNNNDKLINAIKAQYDEFDNFLDNPRLGYFGQAFFSKEGRNYIINYGNECYDILALLSGLAHWVVANNEEESRISRTWLYNLDKNLDNEYISTLNYLYDRITNELTNSFSKNSAANVNYIAETLGINPAEFAEQYFRFSIMKEQKNLGFNITKLREVMLDRKDMSEIRKNHKVFDSIRTKVYTMMDFVIYRYYIEEDAKVAAANKSLPDNEKSLSEKDIFVINLRGSFNDDQKDALYYDEANRIWRKLENIMHNIKEFRGNKTREYKKKDAPRLPRILPAGRDVSAFSKLMYALTMFLDGKEINDLLTTLINKFDNIQSFLKVMPLIGVNAKFVEEYAFFKDSAKIADELRLIKSFARMGEPIADARRAMYIDAIRILGTNLSYDELKALADTFSLDENGNKLKKGKHGMRNFIINNVISNKRFHYLIRYGDPAHLHEIAKNEAVVKFVLGRIADIQKKQGQNGKNQIDRYYETCIGKDKGKSVSEKVDALTKIITGMNYDQFDKKRSVIEDTGRENAEREKFKKIISLYLTVIYHILKNIVNINARYVIGFHCVERDAQLYKEKGYDINLKKLEEKGFSSVTKLCAGIDETAPDKRKDVEKEMAERAKESIDSLESANPKLYANYIKYSDEKKAEEFTRQINREKAKTALNAYLRNTKWNVIIREDLLRIDNKTCTLFANKAVALEVARYVHAYINDIAEVNSYFQLYHYIMQRIIMNERYEKSSGKVSEYFDAVNDEKKYNDRLLKLLCVPFGYCIPRFKNLSIEALFDRNEAAKFDKEKKKVSGNSGSGPKKKRKVSGSETPGTSESATPESQLHLPQVLADAVSRLVLGKFGDLTDNFSSPHARRKVLAGVVMTTGTDVKDAKVISVSTGTKCINGEYMSDRGLALNDCHAEIISRRSLLRFLYTQLELYLNNKDDQKRSIFQKSERGGFRLKENVQFHLYISTSPCGDARIFSPDEPILEEPADRHPNRKARGQLRTKIESGQGTIPVRSNASIQTWDGVLQGERLLTMSCSDKIARWNVVGIQGSLLSIFVEPIYFSSIILGSLYHGDHLSRAMYQRISNIEDLPPLYTLNKPLLSGISNAEARQPGKAPNFSVNWTVGDSAIEVINATTGKDELGRASRLCKHALYCRWMRVHGKVPSHLLRSKITKPNVYHESKLAAKEYQAAKARLFTAFIKAGLGAWVEKPTEQDQFSLT

SEQ ID NO: 60 - protein, 1405 aa, Artificial
  Synthetic dCasRx-hADARdd insert
MSPKKKRKVEASIEKKKSFAKGMGVKSTLVSGSKVYMTTFAEGSDARLEKIVEGDSIRSVNEGEAFSAEMADKNAGYKIGNAKFSHPKGYAVVANNPLYTGPVQQDMLGLKETLEKRYFGESADGNDNICIQVIHNILDIEKILAEYITNAAYAVNNISGLDKDIIGFGKFSTVYTYDEFKDPEHHRAAFNNNDKLINAIKAQYDEFDNFLDNPRLGYFGQAFFSKEGRNYIINYGNECYDILALLSGLAHWVVANNEEESRISRTWLYNLDKNLDNEYISTLNYLYDRITNELTNSFSKNSAANVNYIAETLGINPAEFAEQYFRFSIMKEQKNLGFNITKLREVMLDSGSETPGTSESATPESQLHLPQVLADAVSRLVLGKFGDLTDNFSSPHARRKVLAGVVMTTGTDVKDAKVISVSTGTKCINGEYMSDRGLALNDCHAEIISRRSLLRFLYTQLELYLNNKDDQKRSIFQKSERGGFRLKENVQFHLYISTSPCGDARIFSPDEPILEEPADRHPNRKARGQLRTKIESGQGTIPVRSNASIQTWDGVLQGERLLTMSCSDKIARWNVVGIQGSLLSIFVEPIYFSSIILGSLYHGDHLSRAMYQRISNIEDLPPLYTLNKPLLSGISNAEARQPGKAPNFSVNWTVGDSAIEVINATTGKDELGRASRLCKHALYCRWMRVHGKVPSHLLRSKITKPNVYHESKLAAKEYQAAKARLFTAFIKAGLGAWVEKPTEQDQFSLTSGSETPGTSESATPESRKDMSEIRKNHKVFDSIRTKVYTMMDFVIYRYYIEEDAKVAAANKSLPDNEKSLSEKDIFVINLRGSFNDDQKDALYYDEANRIWRKLENIMHNIKEFRGNKTREYKKKDAPRLPRILPAGRDVSAFSKLMYALTMFLDGKEINDLLTTLINKFDNIQSFLKVMPLIGVNAKFVEEYAFFKDSAKIADELRLIKSFARMGEPIADARRAMYIDAIRILGTNLSYDELKALADTFSLDENGNKLKKGKHGMRNFIINNVISNKRFHYLIRYGDPAHLHEIAKNEAVVKFVLGRIADIQKKQGQNGKNQIDRYYETCIGKDKGKSVSEKVDALTKIITGMNYDQFDKKRSVIEDTGRENAEREKFKKIISLYLTVIYHILKNIVNINARYVIGFHCVERDAQLYKEKGYDINLKKLEEKGFSSVTKLCAGIDETAPDKRKDVEKEMAERAKESIDSLESANPKLYANYIKYSDEKKAEEFTRQINREKAKTALNAYLRNTKWNVIIREDLLRIDNKTCTLFANKAVALEVARYVHAYINDIAEVNSYFQLYHYIMQRIIMNERYEKSSGKVSEYFDAVNDEKKYNDRLLKLLCVPFGYCIPRFKNLSIEALFDRNEAAKFDKEKKKVSGNSGSGPKKKRKV

SEQ ID NO: 61 - protein, 1405 aa, Artificial
  Synthetic dCasRx-hADAR2dd insert
MSPKKKRKVEASIEKKKSFAKGMGVKSTLVSGSKVYMTTFAEGSDARLEKIVEGDSIRSVNEGEAFSAEMADKNAGYKIGNAKFSHPKGYAVVANNPLYTGPVQQDMLGLKETLEKRYFGESADGNDNICIQVIHNILDIEKILAEYITNAAYAVNNISGLDKDIIGFGKFSTVYTYDEFKDPEHHRAAFNNNDKLINAIKAQYDEFDNFLDNPRLGYFGQAFFSKEGRNYIINYGNECYDILALLSGLAHWVVANNEEESRISRTWLYNLDKNLDNEYISTLNYLYDRITNELTNSFSKNSAANVNYIAETLGINPAEFAEQYFRFSIMKEQKNLGFNITKLREVMLDSGSETPGTSESATPESQLHLPQVLADAVSRLVLGKFGDLTDNFSSPHARRKLLAGVVMTTGTDVKDAKVISVSTGTKCINGEYMSDRGLALNDCHAEIISRRSLLRFLYTQLELYLNNKDDQKRSIFQKSERGGFRLKENVQFHLYISTSPCGDARIFSPHEPILEEPADRHPNRKARGQLRTKIESGQGTIPVRSNASIQTWDGVLQGERLLTMSCSDKIARWNVVGIQGSLLSIFVEPIYFSSIILGSLYHGDHLSRAMYQRISNIEDLPPLYTLNKPLLSGISNAEARQPGKAPNFSVNWTVGDSAIEVINATTGKDELGRASRLCKHALYCRWMRVHGKVPSHLLRSKITKPNVYHESKLAAKEYQAAKARLFTAFIKAGLGAWVEKPTEQDQFSLTSGSETPGTSESATPESRKDMSEIRKNHKVFDSIRTKVYTMMDFVIYRYYIEEDAKVAAANKSLPDNEKSLSEKDIFVINLRGSFNDDQKDALYYDEANRIWRKLENIMHNIKEFRGNKTREYKKKDAPRLPRILPAGRDVSAFSKLMYALTMFLDGKEINDLLTTLINKFDNIQSFLKVMPLIGVNAKFVEEYAFFKDSAKIADELRLIKSFARMGEPIADARRAMYIDAIRILGTNLSYDELKALADTFSLDENGNKLKKGKHGMRNFIINNVISNKRFHYLIRYGDPAHLHEIAKNEAVVKFVLGRIADIQKKQGQNGKNQIDRYYETCIGKDKGKSVSEKVDALTKIITGMNYDQFDKKRSVIEDTGRENAEREKFKKIISLYLTVIYHILKNIVNINARYVIGFHCVERDAQLYKEKGYDINLKKLEEKGFSSVTKLCAGIDETAPDKRKDVEKEMAERAKESIDSLESANPKLYANYIKYSDEKKAEEFTRQINREKAKTALNAYLRNTKWNVIIREDLLRIDNKTCTLFANKAVALEVARYVHAYINDIAEVNSYFQLYHYIMQRIIMNERYEKSSGKVSEYFDAVNDEKKYNDRLLKLLCVPFGYCIPRFKNLSIEALFDRNEAAKFDKEKKKVSGNSGSGPKKKRKV

SEQ ID NO: 62 - protein, 1405 aa, Artificial
  Synthetic dCasRx-hADAR2dd insert
MSPKKKRKVEASIEKKKSFAKGMGVKSTLVSGSKVYMTTFAEGSDARLEKIVEGDSIRSVNEGEAFSAEMADKNAGYKIGNAKFSHPKGYAVVANNPLYTGPVQQDMLGLKETLEKRYFGESADGNDNICIQVIHNILDIEKILAEYITNAAYAVNNISGLDKDIIGFGKFSTVYTYDEFKDPEHHRAAFNNNDKLINAIKAQYDEFDNFLDNPRLGYFGQAFFSKEGRNYIINYGNECYDILALLSGLAHWVVANNEEESRISRTWLYNLDKNLDNEYISTLNYLYDRITNELTNSFSKNSAANVNYIAETLGINPAEFAEQYFRFSIMKEQKNLGFNITKLREVMLDSGSETPGTSESATPESQLHLPQVLADAVSRLVLGKFGDLTDNFSSPHARRKVLAGVVMTTGTDVKDAKVISVSTGTKCINGEYMSDRGLALNDCHAEIISRRSLLRFLYTQLELYLNNKDDQKRSIFQKSERGGFRLKENVQFHLYISTSPCGDCRIFSPHEPILEEPADRHPNRKARGQLRTKIESGQGTIPVRSNASIQTWDGVLQGERLLTMSCSDKIARWNVVGIQGSLLSIFVEPIYFSSIILGSLYHGDHLSRAMYQRISNIEDLPPLYTLNKPLLSGISNAEARQPGKAPNFSVNWTVGDSAIEVINATTGKDELGRASRLCKHALYCRWMRVHGKVPSHLLRSKITKPNVYHESKLAAKEYQAAKARLFTAFIKAGLGAWVEKPTEQDQFSLTSGSETPGTSESATPESRKDMSEIRKNHKVFDSIRTKVYTMMDFVIYRYYIEEDAKVAAANKSLPDNEKSLSEKDIFVINLRGSFNDDQKDALYYDEANRIWRKLENIMHNIKEFRGNKTREYKKKDAPRLPRILPAGRDVSAFSKLMYALTMFLDGKEINDLLTTLINKFDNIQSFLKVMPLIGVNAKFVEEYAFFKDSAKIADELRLIKSFARMGEPIADARRAMYIDAIRILGTNLSYDELKALADTFSLDENGNKLKKGKHGMRNFIINNVISNKRFHYLIRYGDPAHLHEIAKNEAVVKFVLGRIADIQKKQGQNGKNQIDRYYETCIGKDKGKSVSEKVDALTKIITGMNYDQFDKKRSVIEDTGRENAEREKFKKIISLYLTVIYHILKNIVNINARYVIGFHCVERDAQLYKEKGYDINLKKLEEKGFSSVTKLCAGIDETAPDKRKDVEKEMAERAKESIDSLESANPKLYANYIKYSDEKKAEEFTRQINREKAKTALNAYLRNTKWNVIIREDLLRIDNKTCTLFANKAVALEVARYVHAYINDIAEVNSYFQLYHYIMQRIIMNERYEKSSGKVSEYFDAVNDEKKYNDRLLKLLCVPFGYCIPRFKNLSIEALFDRNEAAKFDKEKKKVSGNSGSGPKKKRKV

SEQ ID NO: 63 - protein, 1405 aa, Artificial
  Synthetic dCasRx-hADAR2dd insert
MSPKKKRKVEASIEKKKSFAKGMGVKSTLVSGSKVYMTTFAEGSDARLEKIVEGDSIRSVNEGEAFSAEMADKNAGYKIGNAKFSHPKGYAVVANNPLYTGPVQQDMLGLKETLEKRYFGESADGNDNICIQVIHNILDIEKILAEYITNAAYAVNNISGLDKDIIGFGKFSTVYTYDEFKDPEHHRAAFNNNDKLINAIKAQYDEFDNFLDNPRLGYFGQAFFSKEGRNYIINYGNECYDILALLSGLAHWVVANNEEESRISRTWLYNLDKNLDNEYISTLNYLYDRITNELTNSFSKNSAANVNYIAETLGINPAEFAEQYFRFSIMKEQKNLGFNITKLREVMLDSGSETPGTSESATPESQLHLPQVLADAVSRLVLGKFGDLTDNFSSPHARRKVLAGVVMTTGTDVKDAKVISVSTGTKCINGEYMSDRGLALNDCHAEIISRRSLLRFLYTQLELYLNNKDDQKRSIFQKSERGGFRLKENVQFHLYISTSPCGDARIYSPHEPILEEPADRHPNRKARGQLRTKIESGQGTIPVRSNASIQTWDGVLQGERLLTMSCSDKIARWNVVGIQGSLLSIFVEPIYFSSIILGSLYHGDHLSRAMYQRISNIEDLPPLYTLNKPLLSGISNAEARQPGKAPNFSVNWTVGDSAIEVINATTGKDELGRASRLCKHALYCRWMRVHGKVPSHLLRSKITKPNVYHESKLAAKEYQAAKARLFTAFIKAGLGAWVEKPTEQDQFSLTSGSETPGTSESATPESRKDMSEIRKNHKVFDSIRTKVYTMMDFVIYRYYIEEDAKVAAANKSLPDNEKSLSEKDIFVINLRGSFNDDQKDALYYDEANRIWRKLENIMHNIKEFRGNKTREYKKKDAPRLPRILPAGRDVSAFSKLMYALTMFLDGKEINDLLTTLINKFDNIQSFLKVMPLIGVNAKFVEEYAFFKDSAKIADELRLIKSFARMGEPIADARRAMYIDAIRILGTNLSYDELKALADTFSLDENGNKLKKGKHGMRNFIINNVISNKRFHYLIRYGDPAHLHEIAKNEAVVKFVLGRIADIQKKQGQNGKNQIDRYYETCIGKDKGKSVSEKVDALTKIITGMNYDQFDKKRSVIEDTGRENAEREKFKKIISLYLTVIYHILKNIVNINARYVIGFHCVERDAQLYKEKGYDINLKKLEEKGFSSVTKLCAGIDETAPDKRKDVEKEMAERAKESIDSLESANPKLYANYIKYSDEKKAEEFTRQINREKAKTALNAYLRNTKWNVIIREDLLRIDNKTCTLFANKAVALEVARYVHAYINDIAEVNSYFQLYHYIMQRIIMNERYEKSSGKVSEYFDAVNDEKKYNDRLLKLLCVPFGYCIPRFKNLSIEALFDRNEAAKFDKEKKKVSGNSGSGPKKKRKV

SEQ ID NO: 64 - protein, 1405 aa, Artificial
  Synthetic dCasRx-hADAR2dd insert
MSPKKKRKVEASIEKKKSFAKGMGVKSTLVSGSKVYMTTFAEGSDARLEKIVEGDSIRSVNEGEAFSAEMADKNAGYKIGNAKFSHPKGYAVVANNPLYTGPVQQDMLGLKETLEKRYFGESADGNDNICIQVIHNILDIEKILAEYITNAAYAVNNISGLDKDIIGFGKFSTVYTYDEFKDPEHHRAAFNNNDKLINAIKAQYDEFDNFLDNPRLGYFGQAFFSKEGRNYIINYGNECYDILALLSGLAHWVVANNEEESRISRTWLYNLDKNLDNEYISTLNYLYDRITNELTNSFSKNSAANVNYIAETLGINPAEFAEQYFRFSIMKEQKNLGFNITKLREVMLDSGSETPGTSESATPESQLHLPQVLADAVSRLVLGKFGDLTDNFSSPHARRKVLAGVVMTTGTDVKDAKVISVSTGTKCINGEYMSDRGLALNDCHAEIISRRSLLRFLYTQLELYLNNKDDQKRSIFQKSERGGFRLKENVQFHLYISTSPCGDARIFSPHEPILEEPADRHPNRDARGLLRTKIESGQGTIPVRSNASIQTWDGVLQGERLLTMSCSDKIARWNVVGIQGSLLSIFVEPIYFSSIILGSLYHGDHLSRAMYQRISNIEDLPPLYTLNKPLLSGISNAEARQPGKAPNFSVNWTVGDSAIEVINATTGKDELGRASRLCKHALYCRWMRVHGKVPSHLLRSKITKPNVYHESKLAAKEYQAAKARLFTAFIKAGLGAWVEKPTEQDQFSLTSGSETPGTSESATPESRKDMSEIRKNHKVFDSIRTKVYTMMDFVIYRYYIEEDAKVAAANKSLPDNEKSLSEKDIFVINLRGSFNDDQKDALYYDEANRIWRKLENIMHNIKEFRGNKTREYKKKDAPRLPRILPAGRDVSAFSKLMYALTMFLDGKEINDLLTTLINKFDNIQSFLKVMPLIGVNAKFVEEYAFFKDSAKIADELRLIKSFARMGEPIADARRAMYIDAIRILGTNLSYDELKALADTFSLDENGNKLKKGKHGMRNFIINNVISNKRFHYLIRYGDPAHLHEIAKNEAVVKFVLGRIADIQKKQGQNGKNQIDRYYETCIGKDKGKSVSEKVDALTKIITGMNYDQFDKKRSVIEDTGRENAEREKFKKIISLYLTVIYHILKNIVNINARYVIGFHCVERDAQLYKEKGYDINLKKLEEKGFSSVTKLCAGIDETAPDKRKDVEKEMAERAKESIDSLESANPKLYANYIKYSDEKKAEEFTRQINREKAKTALNAYLRNTKWNVIIREDLLRIDNKTCTLFANKAVALEVARYVHAYINDIAEVNSYFQLYHYIMQRIIMNERYEKSSGKVSEYFDAVNDEKKYNDRLLKLLCVPFGYCIPRFKNLSIEALFDRNEAAKFDKEKKKVSGNSGSGPKKKRKV

SEQ ID NO: 65 - protein, 1389 aa, Artificial
  dCasRx-hADAR2dd fusion
MSPKKKRKVEASIEKKKSFAKGMGVKSTLVSGSKVYMTTFAEGSDARLEKIVEGDSIRSVNEGEAFSAEMADKNAGYKIGNAKFSHPKGYAVVANNPLYTGPVQQDMLGLKETLEKRYFGESADGNDNICIQVIHNILDIEKILAEYITNAAYAVNNISGLDKDIIGFGKFSTVYTYDEFKDPEHHRAAFNNNDKLINAIKAQYDEFDNFLDNPRLGYFGQAFFSKEGRNYIINYGNECYDILALLSGLAHWVVANNEEESRISRTWLYNLDKNLDNEYISTLNYLYDRITNELTNSFSKNSAANVNYIAETLGINPAEFAEQYFRFSIMKEQKNLGFNITKLREVMLDRKDMSEIRKNHKVFDSIRTKVYTMMDFVIYRYYIEEDAKVAAANKSLPDNEKSLSEKDIFVINLRGSFNDDQKDALYYDEANRIWRKLENIMHNIKEFRGNKTREYKKKDAPRLPRILPAGRDVSAFSKLMYALTMFLDGKEINDLLTTLINKFDNIQSFLKVMPLIGVNAKFVEEYAFFKDSAKIADELRLIKSFARMGEPIADARRAMYIDAIRILGTNLSYDELKALADTFSLDENGNKLKKGKHGMRNFIINNVISNKRFHYLIRYGDPAHLHEIAKNEAVVKFVLGRIADIQKKQGQNGKNQIDRYYETCIGKDKGKSVSEKVDALTKIITGMNYDQFDKKRSVIEDTGRENAEREKFKKIISLYLTVIYHILKNIVNINARYVIGFHCVERDAQLYKEKGYDINLKKLEEKGFSSVTKLCAGIDETAPDKRKDVEKEMAERAKESIDSLESANPKLYANYIKYSDEKKAEEFTRQINREKAKTALNAYLRNTKWNVIIREDLLRIDNKTCTLFANKAVALEVARYVHAYINDIAEVNSYFQLYHYIMQRIIMNERYEKSSGKVSEYFDAVNDEKKYNDRLLKLLCVPFGYCIPRFKNLSIEALFDRNEAAKFDKEKKKVSGNSGSGPKKKRKVSGSETPGTSESATPESQLHLPQVLADAVSRLVLGKFGDLTDNFSSPHARRKVLAGVVMTTGTDVKDAKVISVSTGTKCINGEYMSDRGLALNDCHAEIISRRSLLRFLYTQLELYLNNKDDQKRSIFQKSERGGFRLKENVQFHLYISTSPCGDARIYSPHEPILEEPADRHPNRKARGQLRTKIESGQGTIPVRSNASIQTWDGVLQGERLLTMSCSDKIARWNVVGIQGSLLSIFVEPIYFSSIILGSLYHGDHLSRAMYQRISNIEDLPPLYTLNKPLLSGISNAEARQPGKAPNFSVNWTVGDSAIEVINATTGKDELGRASRLCKHALYCRWMRVHGKVPSHLLRSKITKPNVYHESKLAAKEYQAAKARLFTAFIKAGLGAWVEKPTEQDQFSLT

SEQ ID NO: 66 - protein, 1389 aa, Artificial
  dCasRx-hADAR2dd fusion
MSPKKKRKVEASIEKKKSFAKGMGVKSTLVSGSKVYMTTFAEGSDARLEKIVEGDSIRSVNEGEAFSAEMADKNAGYKIGNAKFSHPKGYAVVANNPLYTGPVQQDMLGLKETLEKRYFGESADGNDNICIQVIHNILDIEKILAEYITNAAYAVNNISGLDKDIIGFGKFSTVYTYDEFKDPEHHRAAFNNNDKLINAIKAQYDEFDNFLDNPRLGYFGQAFFSKEGRNYIINYGNECYDILALLSGLAHWVVANNEEESRISRTWLYNLDKNLDNEYISTLNYLYDRITNELTNSFSKNSAANVNYIAETLGINPAEFAEQYFRFSIMKEQKNLGFNITKLREVMLDRKDMSEIRKNHKVFDSIRTKVYTMMDFVIYRYYIEEDAKVAAANKSLPDNEKSLSEKDIFVINLRGSFNDDQKDALYYDEANRIWRKLENIMHNIKEFRGNKTREYKKKDAPRLPRILPAGRDVSAFSKLMYALTMFLDGKEINDLLTTLINKFDNIQSFLKVMPLIGVNAKFVEEYAFFKDSAKIADELRLIKSFARMGEPIADARRAMYIDAIRILGTNLSYDELKALADTFSLDENGNKLKKGKHGMRNFIINNVISNKRFHYLIRYGDPAHLHEIAKNEAVVKFVLGRIADIQKKQGQNGKNQIDRYYETCIGKDKGKSVSEKVDALTKIITGMNYDQFDKKRSVIEDTGRENAEREKFKKIISLYLTVIYHILKNIVNINARYVIGFHCVERDAQLYKEKGYDINLKKLEEKGFSSVTKLCAGIDETAPDKRKDVEKEMAERAKESIDSLESANPKLYANYIKYSDEKKAEEFTRQINREKAKTALNAYLRNTKWNVIIREDLLRIDNKTCTLFANKAVALEVARYVHAYINDIAEVNSYFQLYHYIMQRIIMNERYEKSSGKVSEYFDAVNDEKKYNDRLLKLLCVPFGYCIPRFKNLSIEALFDRNEAAKFDKEKKKVSGNSGSGPKKKRKVSGSETPGTSESATPESQLHLPQVLADAVSRLVLGKFGDLTDNFSSPHARRKVLAGVVMTTGTDVKDAKVISVSTGTKCINGEYMSDRGLALNDCHAEIISRRSLLRFLYTQLELYLNNKDDQKRSIFQKSERGGFRLKENVQFHLYISTSPCGDARIFSPHEPILEEPADRHPNRKAAGQLRTKIESGQGTIPVRSNASIQTWDGVLQGERLLTMSCSDKIARWNVVGIQGSLLSIFVEPIYFSSIILGSLYHGDHLSRAMYQRISNIEDLPPLYTLNKPLLSGISNAEARQPGKAPNFSVNWTVGDSAIEVINATTGKDELGRASRLCKHALYCRWMRVHGKVPSHLLRSKITKPNVYHESKLAAKEYQAAKARLFTAFIKAGLGAWVEKPTEQDQFSLT

SEQ ID NO: 67 - protein, 1389 aa, Artificial
  dCasRx-hADAR2dd fusion
MSPKKKRKVEASIEKKKSFAKGMGVKSTLVSGSKVYMTTFAEGSDARLEKIVEGDSIRSVNEGEAFSAEMADKNAGYKIGNAKFSHPKGYAVVANNPLYTGPVQQDMLGLKETLEKRYFGESADGNDNICIQVIHNILDIEKILAEYITNAAYAVNNISGLDKDIIGFGKFSTVYTYDEFKDPEHHRAAFNNNDKLINAIKAQYDEFDNFLDNPRLGYFGQAFFSKEGRNYIINYGNECYDILALLSGLAHWVVANNEEESRISRTWLYNLDKNLDNEYISTLNYLYDRITNELTNSFSKNSAANVNYIAETLGINPAEFAEQYFRFSIMKEQKNLGFNITKLREVMLDRKDMSEIRKNHKVFDSIRTKVYTMMDFVIYRYYIEEDAKVAAANKSLPDNEKSLSEKDIFVINLRGSFNDDQKDALYYDEANRIWRKLENIMHNIKEFRGNKTREYKKKDAPRLPRILPAGRDVSAFSKLMYALTMFLDGKEINDLLTTLINKFDNIQSFLKVMPLIGVNAKFVEEYAFFKDSAKIADELRLIKSFARMGEPIADARRAMYIDAIRILGTNLSYDELKALADTFSLDENGNKLKKGKHGMRNFIINNVISNKRFHYLIRYGDPAHLHEIAKNEAVVKFVLGRIADIQKKQGQNGKNQIDRYYETCIGKDKGKSVSEKVDALTKIITGMNYDQFDKKRSVIEDTGRENAEREKFKKIISLYLTVIYHILKNIVNINARYVIGFHCVERDAQLYKEKGYDINLKKLEEKGFSSVTKLCAGIDETAPDKRKDVEKEMAERAKESIDSLESANPKLYANYIKYSDEKKAEEFTRQINREKAKTALNAYLRNTKWNVIIREDLLRIDNKTCTLFANKAVALEVARYVHAYINDIAEVNSYFQLYHYIMQRIIMNERYEKSSGKVSEYFDAVNDEKKYNDRLLKLLCVPFGYCIPRFKNLSIEALFDRNEAAKFDKEKKKVSGNSGSGPKKKRKVSGSETPGTSESATPESQLHLPQVLADAVSRLVLGKFGDLTDNFSSPHARRKVLAGVVMTTGTDVKDAKVISVSTGTKCINGEYMSDRGLALNDCHAEIISRRSLLRFLYTQLELYLNNKDDQKRSIFQKSERGGFRLKENVQFHLYISTSPCGDARIFSPHEPILEEPADRHPNRDARGQLRTKIESGQGTIPVRSNASIQTWDGVLQGERLLTMSCSDKIARWNVVGIQGSLLSIFVEPIYFSSIILGSLYHGDHLSRAMYQRISNIEDLPPLYTLNKPLLSGISNAEARQPGKAPNFSVNWTVGDSAIEVINATTGKDELGRASRLCKHALYCRWMRVHGKVPSHLLRSKITKPNVYHESKLAAKEYQAAKARLFTAFIKAGLGAWVEKPTEQDQFSLT

SEQ ID NO: 68 - protein, 1389 aa, Artificial
  dCasRx-hADAR2dd fusion
MSPKKKRKVEASIEKKKSFAKGMGVKSTLVSGSKVYMTTFAEGSDARLEKIVEGDSIRSVNEGEAFSAEMADKNAGYKIGNAKFSHPKGYAVVANNPLYTGPVQQDMLGLKETLEKRYFGESADGNDNICIQVIHNILDIEKILAEYITNAAYAVNNISGLDKDIIGFGKFSTVYTYDEFKDPEHHRAAFNNNDKLINAIKAQYDEFDNFLDNPRLGYFGQAFFSKEGRNYIINYGNECYDILALLSGLAHWVVANNEEESRISRTWLYNLDKNLDNEYISTLNYLYDRITNELTNSFSKNSAANVNYIAETLGINPAEFAEQYFRFSIMKEQKNLGFNITKLREVMLDRKDMSEIRKNHKVFDSIRTKVYTMMDFVIYRYYIEEDAKVAAANKSLPDNEKSLSEKDIFVINLRGSFNDDQKDALYYDEANRIWRKLENIMHNIKEFRGNKTREYKKKDAPRLPRILPAGRDVSAFSKLMYALTMFLDGKEINDLLTTLINKFDNIQSFLKVMPLIGVNAKFVEEYAFFKDSAKIADELRLIKSFARMGEPIADARRAMYIDAIRILGTNLSYDELKALADTFSLDENGNKLKKGKHGMRNFIINNVISNKRFHYLIRYGDPAHLHEIAKNEAVVKFVLGRIADIQKKQGQNGKNQIDRYYETCIGKDKGKSVSEKVDALTKIITGMNYDQFDKKRSVIEDTGRENAEREKFKKIISLYLTVIYHILKNIVNINARYVIGFHCVERDAQLYKEKGYDINLKKLEEKGFSSVTKLCAGIDETAPDKRKDVEKEMAERAKESIDSLESANPKLYANYIKYSDEKKAEEFTRQINREKAKTALNAYLRNTKWNVIIREDLLRIDNKTCTLFANKAVALEVARYVHAYINDIAEVNSYFQLYHYIMQRIIMNERYEKSSGKVSEYFDAVNDEKKYNDRLLKLLCVPFGYCIPRFKNLSIEALFDRNEAAKFDKEKKKVSGNSGSGPKKKRKVSGSETPGTSESATPESQLHLPQVLADAVSRLVLGKFGDLTDNFSSPHARRKVLAGVVMTTGTDVKDAKVISVSTGTKCINGEYMSDRGLALNDCHAEIISRRSLLRFLYTQLELYLNNKDDQKRSIFQKSERGGFRLKENVQFHLYISTSPCGDARIFSPAEPILEEPADRHPNRKARGQLRTKIESGQGTIPVRSNASIQTWDGVLQGERLLTMSCSDKIARWNVVGIQGSLLSIFVEPIYFSSIILGSLYHGDHLSRAMYQRISNIEDLPPLYTLNKPLLSGISNAEARQPGKAPNFSVNWTVGDSAIEVINATTGKDELGRASRLCKHALYCRWMRVHGKVPSHLLRSKITKPNVYHESKLAAKEYQAAKARLFTAFIKAGLGAWVEKPTEQDQFSLT

SEQ ID NO: 69 - protein, 1389 aa, Artificial
  dCasRx-hADAR2dd fusion
MSPKKKRKVEASIEKKKSFAKGMGVKSTLVSGSKVYMTTFAEGSDARLEKIVEGDSIRSVNEGEAFSAEMADKNAGYKIGNAKFSHPKGYAVVANNPLYTGPVQQDMLGLKETLEKRYFGESADGNDNICIQVIHNILDIEKILAEYITNAAYAVNNISGLDKDIIGFGKFSTVYTYDEFKDPEHHRAAFNNNDKLINAIKAQYDEFDNFLDNPRLGYFGQAFFSKEGRNYIINYGNECYDILALLSGLAHWVVANNEEESRISRTWLYNLDKNLDNEYISTLNYLYDRITNELTNSFSKNSAANVNYIAETLGINPAEFAEQYFRFSIMKEQKNLGFNITKLREVMLDRKDMSEIRKNHKVFDSIRTKVYTMMDFVIYRYYIEEDAKVAAANKSLPDNEKSLSEKDIFVINLRGSFNDDQKDALYYDEANRIWRKLENIMHNIKEFRGNKTREYKKKDAPRLPRILPAGRDVSAFSKLMYALTMFLDGKEINDLLTTLINKFDNIQSFLKVMPLIGVNAKFVEEYAFFKDSAKIADELRLIKSFARMGEPIADARRAMYIDAIRILGTNLSYDELKALADTFSLDENGNKLKKGKHGMRNFIINNVISNKRFHYLIRYGDPAHLHEIAKNEAVVKFVLGRIADIQKKQGQNGKNQIDRYYETCIGKDKGKSVSEKVDALTKIITGMNYDQFDKKRSVIEDTGRENAEREKFKKIISLYLTVIYHILKNIVNINARYVIGFHCVERDAQLYKEKGYDINLKKLEEKGFSSVTKLCAGIDETAPDKRKDVEKEMAERAKESIDSLESANPKLYANYIKYSDEKKAEEFTRQINREKAKTALNAYLRNTKWNVIIREDLLRIDNKTCTLFANKAVALEVARYVHAYINDIAEVNSYFQLYHYIMQRIIMNERYEKSSGKVSEYFDAVNDEKKYNDRLLKLLCVPFGYCIPRFKNLSIEALFDRNEAAKFDKEKKKVSGNSGSGPKKKRKVSGSETPGTSESATPESQLHLPQVLADAVSRLVLGKFGDLTDNFSSPHARRKVLAGVVMTTGTDVKDAKVISVSTGTKCINGEYMSDRGLALNDCHAEIISRRSLLRFLYTQLELYLNNKDDQKRSIFQKSERGGFRLKENVQFHLYISTSPCGDCRIFSPHEPILEEPADRHPNRKARGQLRTKIESGQGTIPVRSNASIQTWDGVLQGERLLTMSCSDKIARWNVVGIQGSLLSIFVEPIYFSSIILGSLYHGDHLSRAMYQRISNIEDLPPLYTLNKPLLSGISNAEARQPGKAPNFSVNWTVGDSAIEVINATTGKDELGRASRLCKHALYCRWMRVHGKVPSHLLRSKITKPNVYHESKLAAKEYQAAKARLFTAFIKAGLGAWVEKPTEQDQFSLT

SEQ ID NO: 70 - protein, 1389 aa, Artificial
  dCasRx-hADAR2dd fusion
MSPKKKRKVEASIEKKKSFAKGMGVKSTLVSGSKVYMTTFAEGSDARLEKIVEGDSIRSVNEGEAFSAEMADKNAGYKIGNAKFSHPKGYAVVANNPLYTGPVQQDMLGLKETLEKRYFGESADGNDNICIQVIHNILDIEKILAEYITNAAYAVNNISGLDKDIIGFGKFSTVYTYDEFKDPEHHRAAFNNNDKLINAIKAQYDEFDNFLDNPRLGYFGQAFFSKEGRNYIINYGNECYDILALLSGLAHWVVANNEEESRISRTWLYNLDKNLDNEYISTLNYLYDRITNELTNSFSKNSAANVNYIAETLGINPAEFAEQYFRFSIMKEQKNLGFNITKLREVMLDRKDMSEIRKNHKVFDSIRTKVYTMMDFVIYRYYIEEDAKVAAANKSLPDNEKSLSEKDIFVINLRGSFNDDQKDALYYDEANRIWRKLENIMHNIKEFRGNKTREYKKKDAPRLPRILPAGRDVSAFSKLMYALTMFLDGKEINDLLTTLINKFDNIQSFLKVMPLIGVNAKFVEEYAFFKDSAKIADELRLIKSFARMGEPIADARRAMYIDAIRILGTNLSYDELKALADTFSLDENGNKLKKGKHGMRNFIINNVISNKRFHYLIRYGDPAHLHEIAKNEAVVKFVLGRIADIQKKQGQNGKNQIDRYYETCIGKDKGKSVSEKVDALTKIITGMNYDQFDKKRSVIEDTGRENAEREKFKKIISLYLTVIYHILKNIVNINARYVIGFHCVERDAQLYKEKGYDINLKKLEEKGFSSVTKLCAGIDETAPDKRKDVEKEMAERAKESIDSLESANPKLYANYIKYSDEKKAEEFTRQINREKAKTALNAYLRNTKWNVIIREDLLRIDNKTCTLFANKAVALEVARYVHAYINDIAEVNSYFQLYHYIMQRIIMNERYEKSSGKVSEYFDAVNDEKKYNDRLLKLLCVPFGYCIPRFKNLSIEALFDRNEAAKFDKEKKKVSGNSGSGPKKKRKVSGSETPGTSESATPESQLHLPQVLADAVSRLVLGKFGDLTDNFSSPHARGKVLAGVVMTTGTDVKDAKVISVSTGTKCINGEYMSDRGLALNDCHAEIISRRSLLRFLYTQLELYLNNKDDQKRSIFQKSERGGFRLKENVQFHLYISTSPCGDARIFSPHEPILEEPADRHPNRKARGQLRTKIESGQGTIPVRSNASIQTWDGVLQGERLLTMSCSDKIARWNVVGIQGSLLSIFVEPIYFSSIILGSLYHGDHLSRAMYQRISNIEDLPPLYTLNKPLLSGISNAEARQPGKAPNFSVNWTVGDSAIEVINATTGKDELGRASRLCKHALYCRWMRVHGKVPSHLLRSKITKPNVYHESKLAAKEYQAAKARLFTAFIKAGLGAWVEKPTEQDQFSLT

SEQ ID NO: 71 - protein, 1389 aa, Artificial
  dCasRx-hADAR2dd fusion
MSPKKKRKVEASIEKKKSFAKGMGVKSTLVSGSKVYMTTFAEGSDARLEKIVEGDSIRSVNEGEAFSAEMADKNAGYKIGNAKFSHPKGYAVVANNPLYTGPVQQDMLGLKETLEKRYFGESADGNDNICIQVIHNILDIEKILAEYITNAAYAVNNISGLDKDIIGFGKFSTVYTYDEFKDPEHHRAAFNNNDKLINAIKAQYDEFDNFLDNPRLGYFGQAFFSKEGRNYIINYGNECYDILALLSGLAHWVVANNEEESRISRTWLYNLDKNLDNEYISTLNYLYDRITNELTNSFSKNSAANVNYIAETLGINPAEFAEQYFRFSIMKEQKNLGFNITKLREVMLDRKDMSEIRKNHKVFDSIRTKVYTMMDFVIYRYYIEEDAKVAAANKSLPDNEKSLSEKDIFVINLRGSFNDDQKDALYYDEANRIWRKLENIMHNIKEFRGNKTREYKKKDAPRLPRILPAGRDVSAFSKLMYALTMFLDGKEINDLLTTLINKFDNIQSFLKVMPLIGVNAKFVEEYAFFKDSAKIADELRLIKSFARMGEPIADARRAMYIDAIRILGTNLSYDELKALADTFSLDENGNKLKKGKHGMRNFIINNVISNKRFHYLIRYGDPAHLHEIAKNEAVVKFVLGRIADIQKKQGQNGKNQIDRYYETCIGKDKGKSVSEKVDALTKIITGMNYDQFDKKRSVIEDTGRENAEREKFKKIISLYLTVIYHILKNIVNINARYVIGFHCVERDAQLYKEKGYDINLKKLEEKGFSSVTKLCAGIDETAPDKRKDVEKEMAERAKESIDSLESANPKLYANYIKYSDEKKAEEFTRQINREKAKTALNAYLRNTKWNVIIREDLLRIDNKTCTLFANKAVALEVARYVHAYINDIAEVNSYFQLYHYIMQRIIMNERYEKSSGKVSEYFDAVNDEKKYNDRLLKLLCVPFGYCIPRFKNLSIEALFDRNEAAKFDKEKKKVSGNSGSGPKKKRKVSGSETPGTSESATPESQLHLPQVLADAVSRLVLGKFGDLTDNFSSPHARRKLLAGVVMTTGTDVKDAKVISVSTGTKCINGEYMSDRGLALNDCHAEIISRRSLLRFLYTQLELYLNNKDDQKRSIFQKSERGGFRLKENVQFHLYISTSPCGDARIFSPHEPILEEPADRHPNRKARGQLRTKIESGQGTIPVRSNASIQTWDGVLQGERLLTMSCSDKIARWNVVGIQGSLLSIFVEPIYFSSIILGSLYHGDHLSRAMYQRISNIEDLPPLYTLNKPLLSGISNAEARQPGKAPNFSVNWTVGDSAIEVINATTGKDELGRASRLCKHALYCRWMRVHGKVPSHLLRSKITKPNVYHESKLAAKEYQAAKARLFTAFIKAGLGAWVEKPTEQDQFSLT

SEQ ID NO: 72 - protein, 1389 aa, Artificial
  dCasRx-hADAR2dd fusion
MSPKKKRKVEASIEKKKSFAKGMGVKSTLVSGSKVYMTTFAEGSDARLEKIVEGDSIRSVNEGEAFSAEMADKNAGYKIGNAKFSHPKGYAVVANNPLYTGPVQQDMLGLKETLEKRYFGESADGNDNICIQVIHNILDIEKILAEYITNAAYAVNNISGLDKDIIGFGKFSTVYTYDEFKDPEHHRAAFNNNDKLINAIKAQYDEFDNFLDNPRLGYFGQAFFSKEGRNYIINYGNECYDILALLSGLAHWVVANNEEESRISRTWLYNLDKNLDNEYISTLNYLYDRITNELTNSFSKNSAANVNYIAETLGINPAEFAEQYFRFSIMKEQKNLGFNITKLREVMLDRKDMSEIRKNHKVFDSIRTKVYTMMDFVIYRYYIEEDAKVAAANKSLPDNEKSLSEKDIFVINLRGSFNDDQKDALYYDEANRIWRKLENIMHNIKEFRGNKTREYKKKDAPRLPRILPAGRDVSAFSKLMYALTMFLDGKEINDLLTTLINKFDNIQSFLKVMPLIGVNAKFVEEYAFFKDSAKIADELRLIKSFARMGEPIADARRAMYIDAIRILGTNLSYDELKALADTFSLDENGNKLKKGKHGMRNFIINNVISNKRFHYLIRYGDPAHLHEIAKNEAVVKFVLGRIADIQKKQGQNGKNQIDRYYETCIGKDKGKSVSEKVDALTKIITGMNYDQFDKKRSVIEDTGRENAEREKFKKIISLYLTVIYHILKNIVNINARYVIGFHCVERDAQLYKEKGYDINLKKLEEKGFSSVTKLCAGIDETAPDKRKDVEKEMAERAKESIDSLESANPKLYANYIKYSDEKKAEEFTRQINREKAKTALNAYLRNTKWNVIIREDLLRIDNKTCTLFANKAVALEVARYVHAYINDIAEVNSYFQLYHYIMQRIIMNERYEKSSGKVSEYFDAVNDEKKYNDRLLKLLCVPFGYCIPRFKNLSIEALFDRNEAAKFDKEKKKVSGNSGSGPKKKRKVSGSETPGTSESATPESQLHLPQVLADAVSRLVLGKFGDLTDNFSSPHARRKVLAGVVMTTGTDVKDAKVISVSTGTKCINGEYMSDRGLALNDCHAEIISRRSLLRFLYTQLELYLNNKDDQKRSIFQKSERGGFRLKENVQFHLYISTSPCGDAGIFSPHEPILEEPADRHPNRAARGQLRTKIESGQGTIPVRSNASIQTWDGVLQGERLLTMSCSDKIARWNVVGIQGSLLSIFVEPIYFSSIILGSLYHGDHLSRAMYQRISNIEDLPPLYTLNKPLLSGISNAEARQPGKAPNFSVNWTVGDSAIEVINATTGKDELGRASRLCKHALYCRWMRVHGKVPSHLLRSKITKPNVYHESKLAAKEYQAAKARLFTAFIKAGLGAWVEKPTEQDQFSLT

SEQ ID NO: 73 - protein, 1389 aa, Artificial
  dCasRx-hADAR2dd fusion
MSPKKKRKVEASIEKKKSFAKGMGVKSTLVSGSKVYMTTFAEGSDARLEKIVEGDSIRSVNEGEAFSAEMADKNAGYKIGNAKFSHPKGYAVVANNPLYTGPVQQDMLGLKETLEKRYFGESADGNDNICIQVIHNILDIEKILAEYITNAAYAVNNISGLDKDIIGFGKFSTVYTYDEFKDPEHHRAAFNNNDKLINAIKAQYDEFDNFLDNPRLGYFGQAFFSKEGRNYIINYGNECYDILALLSGLAHWVVANNEEESRISRTWLYNLDKNLDNEYISTLNYLYDRITNELTNSFSKNSAANVNYIAETLGINPAEFAEQYFRFSIMKEQKNLGFNITKLREVMLDRKDMSEIRKNHKVFDSIRTKVYTMMDFVIYRYYIEEDAKVAAANKSLPDNEKSLSEKDIFVINLRGSFNDDQKDALYYDEANRIWRKLENIMHNIKEFRGNKTREYKKKDAPRLPRILPAGRDVSAFSKLMYALTMFLDGKEINDLLTTLINKFDNIQSFLKVMPLIGVNAKFVEEYAFFKDSAKIADELRLIKSFARMGEPIADARRAMYIDAIRILGTNLSYDELKALADTFSLDENGNKLKKGKHGMRNFIINNVISNKRFHYLIRYGDPAHLHEIAKNEAVVKFVLGRIADIQKKQGQNGKNQIDRYYETCIGKDKGKSVSEKVDALTKIITGMNYDQFDKKRSVIEDTGRENAEREKFKKIISLYLTVIYHILKNIVNINARYVIGFHCVERDAQLYKEKGYDINLKKLEEKGFSSVTKLCAGIDETAPDKRKDVEKEMAERAKESIDSLESANPKLYANYIKYSDEKKAEEFTRQINREKAKTALNAYLRNTKWNVIIREDLLRIDNKTCTLFANKAVALEVARYVHAYINDIAEVNSYFQLYHYIMQRIIMNERYEKSSGKVSEYFDAVNDEKKYNDRLLKLLCVPFGYCIPRFKNLSIEALFDRNEAAKFDKEKKKVSGNSGSGPKKKRKVSGSETPGTSESATPESQLHLPQVLADAVSRLVLGKFGDLTDNFSSPHARRKVLAGVVMTTGTDVKDAKVISVSTGTKCINGEYMSDRGLALNDCHAEIISRRSLLRFLYTQLELYLNNKDDQKRSIFQKSERGGFRLKENVQFHLYISTSPCGDARIFSPDEPILEEPADAHPNRKARGQLRTKIESGQGTIPVRSNASIQTWDGVLQGERLLTMSCSDKIARWNVVGIQGSLLSIFVEPIYFSSIILGSLYHGDHLSRAMYQRISNIEDLPPLYTLNKPLLSGISNAEARQPGKAPNFSVNWTVGDSAIEVINATTGKDELGRASRLCKHALYCRWMRVHGKVPSHLLRSKITKPNVYHESKLAAKEYQAAKARLFTAFIKAGLGAWVEKPTEQDQFSLT

SEQ ID NO: 74 - protein, 1389 aa, Artificial
  dCasRx-hADAR2dd fusion
MSPKKKRKVEASIEKKKSFAKGMGVKSTLVSGSKVYMTTFAEGSDARLEKIVEGDSIRSVNEGEAFSAEMADKNAGYKIGNAKFSHPKGYAVVANNPLYTGPVQQDMLGLKETLEKRYFGESADGNDNICIQVIHNILDIEKILAEYITNAAYAVNNISGLDKDIIGFGKFSTVYTYDEFKDPEHHRAAFNNNDKLINAIKAQYDEFDNFLDNPRLGYFGQAFFSKEGRNYIINYGNECYDILALLSGLAHWVVANNEEESRISRTWLYNLDKNLDNEYISTLNYLYDRITNELTNSFSKNSAANVNYIAETLGINPAEFAEQYFRFSIMKEQKNLGFNITKLREVMLDRKDMSEIRKNHKVFDSIRTKVYTMMDFVIYRYYIEEDAKVAAANKSLPDNEKSLSEKDIFVINLRGSFNDDQKDALYYDEANRIWRKLENIMHNIKEFRGNKTREYKKKDAPRLPRILPAGRDVSAFSKLMYALTMFLDGKEINDLLTTLINKFDNIQSFLKVMPLIGVNAKFVEEYAFFKDSAKIADELRLIKSFARMGEPIADARRAMYIDAIRILGTNLSYDELKALADTFSLDENGNKLKKGKHGMRNFIINNVISNKRFHYLIRYGDPAHLHEIAKNEAVVKFVLGRIADIQKKQGQNGKNQIDRYYETCIGKDKGKSVSEKVDALTKIITGMNYDQFDKKRSVIEDTGRENAEREKFKKIISLYLTVIYHILKNIVNINARYVIGFHCVERDAQLYKEKGYDINLKKLEEKGFSSVTKLCAGIDETAPDKRKDVEKEMAERAKESIDSLESANPKLYANYIKYSDEKKAEEFTRQINREKAKTALNAYLRNTKWNVIIREDLLRIDNKTCTLFANKAVALEVARYVHAYINDIAEVNSYFQLYHYIMQRIIMNERYEKSSGKVSEYFDAVNDEKKYNDRLLKLLCVPFGYCIPRFKNLSIEALFDRNEAAKFDKEKKKVSGNSGSGPKKKRKVSGSETPGTSESATPESQLHLPQVLADAVSRLVLGKFGDLTDNFSSPHARRKVLAGVVMTTGTDVKDAKVISVSTGTKCINGEYMSDRGLALNDCHAEIISRRSLLRFLYTQLELYLNNKDDQKRSIFQKSERGGFRLKENVQFHLYISTSPCGDARIFSPHEPILEEPADRHPNRDARGLLRTKIESGQGTIPVRSNASIQTWDGVLQGERLLTMSCSDKIARWNVVGIQGSLLSIFVEPIYFSSIILGSLYHGDHLSRAMYQRISNIEDLPPLYTLNKPLLSGISNAEARQPGKAPNFSVNWTVGDSAIEVINATTGKDELGRASRLCKHALYCRWMRVHGKVPSHLLRSKITKPNVYHESKLAAKEYQAAKARLFTAFIKAGLGAWVEKPTEQDQFSLT

SEQ ID NO: 75 - protein, 1389 aa, Artificial
  dCasRx-hADAR2dd fusion
MSPKKKRKVEASIEKKKSFAKGMGVKSTLVSGSKVYMTTFAEGSDARLEKIVEGDSIRSVNEGEAFSAEMADKNAGYKIGNAKFSHPKGYAVVANNPLYTGPVQQDMLGLKETLEKRYFGESADGNDNICIQVIHNILDIEKILAEYITNAAYAVNNISGLDKDIIGFGKFSTVYTYDEFKDPEHHRAAFNNNDKLINAIKAQYDEFDNFLDNPRLGYFGQAFFSKEGRNYIINYGNECYDILALLSGLAHWVVANNEEESRISRTWLYNLDKNLDNEYISTLNYLYDRITNELTNSFSKNSAANVNYIAETLGINPAEFAEQYFRFSIMKEQKNLGFNITKLREVMLDRKDMSEIRKNHKVFDSIRTKVYTMMDFVIYRYYIEEDAKVAAANKSLPDNEKSLSEKDIFVINLRGSFNDDQKDALYYDEANRIWRKLENIMHNIKEFRGNKTREYKKKDAPRLPRILPAGRDVSAFSKLMYALTMFLDGKEINDLLTTLINKFDNIQSFLKVMPLIGVNAKFVEEYAFFKDSAKIADELRLIKSFARMGEPIADARRAMYIDAIRILGTNLSYDELKALADTFSLDENGNKLKKGKHGMRNFIINNVISNKRFHYLIRYGDPAHLHEIAKNEAVVKFVLGRIADIQKKQGQNGKNQIDRYYETCIGKDKGKSVSEKVDALTKIITGMNYDQFDKKRSVIEDTGRENAEREKFKKIISLYLTVIYHILKNIVNINARYVIGFHCVERDAQLYKEKGYDINLKKLEEKGFSSVTKLCAGIDETAPDKRKDVEKEMAERAKESIDSLESANPKLYANYIKYSDEKKAEEFTRQINREKAKTALNAYLRNTKWNVIIREDLLRIDNKTCTLFANKAVALEVARYVHAYINDIAEVNSYFQLYHYIMQRIIMNERYEKSSGKVSEYFDAVNDEKKYNDRLLKLLCVPFGYCIPRFKNLSIEALFDRNEAAKFDKEKKKVSGNSGSGPKKKRKVSGSETPGTSESATPESQLHLPQVLADAVSRLVLGKFGDLTDNFSSPHARRKVLAGVVMTTGTDVKDAKVISVSTGTKCINGEYMSDRGLALNDCHAEIISRRSLLRFLYTQLELYLNNKDDQKRSIFQKSERGGFRLKENVQFHLYISTSPCGDAAIFAPHEPILEEPADRHPNRDARGQLRTKIESGQGTIPVRSNASIQTWDGVLQGERLLTMSCSDKIARWNVVGIQGSLLSIFVEPIYFSSIILGSLYHGDHLSRAMYQRISNIEDLPPLYTLNKPLLSGISNAEARQPGKAPNFSVNWTVGDSAIEVINATTGKDELGRASRLCKHALYCRWMRVHGKVPSHLLRSKITKPNVYHESKLAAKEYQAAKARLFTAFIKAGLGAWVEKPTEQDQFSLT

SEQ ID NO: 76 - protein, 1389 aa, Artificial
  dCasRx-hADAR2dd fusion
MSPKKKRKVEASIEKKKSFAKGMGVKSTLVSGSKVYMTTFAEGSDARLEKIVEGDSIRSVNEGEAFSAEMADKNAGYKIGNAKFSHPKGYAVVANNPLYTGPVQQDMLGLKETLEKRYFGESADGNDNICIQVIHNILDIEKILAEYITNAAYAVNNISGLDKDIIGFGKFSTVYTYDEFKDPEHHRAAFNNNDKLINAIKAQYDEFDNFLDNPRLGYFGQAFFSKEGRNYIINYGNECYDILALLSGLAHWVVANNEEESRISRTWLYNLDKNLDNEYISTLNYLYDRITNELTNSFSKNSAANVNYIAETLGINPAEFAEQYFRFSIMKEQKNLGFNITKLREVMLDRKDMSEIRKNHKVFDSIRTKVYTMMDFVIYRYYIEEDAKVAAANKSLPDNEKSLSEKDIFVINLRGSFNDDQKDALYYDEANRIWRKLENIMHNIKEFRGNKTREYKKKDAPRLPRILPAGRDVSAFSKLMYALTMFLDGKEINDLLTTLINKFDNIQSFLKVMPLIGVNAKFVEEYAFFKDSAKIADELRLIKSFARMGEPIADARRAMYIDAIRILGTNLSYDELKALADTFSLDENGNKLKKGKHGMRNFIINNVISNKRFHYLIRYGDPAHLHEIAKNEAVVKFVLGRIADIQKKQGQNGKNQIDRYYETCIGKDKGKSVSEKVDALTKIITGMNYDQFDKKRSVIEDTGRENAEREKFKKIISLYLTVIYHILKNIVNINARYVIGFHCVERDAQLYKEKGYDINLKKLEEKGFSSVTKLCAGIDETAPDKRKDVEKEMAERAKESIDSLESANPKLYANYIKYSDEKKAEEFTRQINREKAKTALNAYLRNTKWNVIIREDLLRIDNKTCTLFANKAVALEVARYVHAYINDIAEVNSYFQLYHYIMQRIIMNERYEKSSGKVSEYFDAVNDEKKYNDRLLKLLCVPFGYCIPRFKNLSIEALFDRNEAAKFDKEKKKVSGNSGSGPKKKRKVSGSETPGTSESATPESQLHLPQVLADAVSRLVLGKFGDLTDNFSSPHAGRKVLAGVVMTTGTDVKDAKVISVSTGTKCINGEYMSDRGLALNDCHAEIISRRSLLRFLYTQLELYLNNKDDQKRSIFQKSERGGFRLKENVQFHLYISTSPCGDARIFSPHEPILEEPADRHPNRKARGQLRTKIESGQGTIPVRSNASIQTWDGVLQGERLLTMSCSDKIARWNVVGIQGSLLSIFVEPIYFSSIILGSLYHGDHLSRAMYQRISNIEDLPPLYTLNKPLLSGISNAEARQPGKAPNFSVNWTVGDSAIEVINATTGKDELGRASRLCKHALYCRWMRVHGKVPSHLLRSKITKPNVYHESKLAAKEYQAAKARLFTAFIKAGLGAWVEKPTEQDQFSLT

SEQ ID NO: 77 - protein, 1240 aa, Artificial
  Synthetic ADAR2dd(465-700)(E488Q)-xten-NLS-dCasRx-NLS
MEEPADRHPNRKARGQLRTKIESGQGTIPVRSNASIQTWDGVLQGERLLTMSCSDKIARWNVVGIQGSLLSIFVEPIYFSSIILGSLYHGDHLSRAMYQRISNIEDLPPLYTLNKPLLSGISNAEARQPGKAPNFSVNWTVGDSAIEVINATTGKDELGRASRLCKHALYCRWMRVHGKVPSHLLRSKITKPNVYHESKLAAKEYQAAKARLFTAFIKAGLGAWVEKPTEQDQFSLTSGSETPGTSESATPESSPKKKRKVEASIEKKKSFAKGMGVKSTLVSGSKVYMTTFAEGSDARLEKIVEGDSIRSVNEGEAFSAEMADKNAGYKIGNAKFSHPKGYAVVANNPLYTGPVQQDMLGLKETLEKRYFGESADGNDNICIQVIHNILDIEKILAEYITNAAYAVNNISGLDKDIIGFGKFSTVYTYDEFKDPEHHRAAFNNNDKLINAIKAQYDEFDNFLDNPRLGYFGQAFFSKEGRNYIINYGNECYDILALLSGLAHWVVANNEEESRISRTWLYNLDKNLDNEYISTLNYLYDRITNELTNSFSKNSAANVNYIAETLGINPAEFAEQYFRFSIMKEQKNLGFNITKLREVMLDRKDMSEIRKNHKVFDSIRTKVYTMMDFVIYRYYIEEDAKVAAANKSLPDNEKSLSEKDIFVINLRGSFNDDQKDALYYDEANRIWRKLENIMHNIKEFRGNKTREYKKKDAPRLPRILPAGRDVSAFSKLMYALTMFLDGKEINDLLTTLINKFDNIQSFLKVMPLIGVNAKFVEEYAFFKDSAKIADELRLIKSFARMGEPIADARRAMYIDAIRILGTNLSYDELKALADTFSLDENGNKLKKGKHGMRNFIINNVISNKRFHYLIRYGDPAHLHEIAKNEAVVKFVLGRIADIQKKQGQNGKNQIDRYYETCIGKDKGKSVSEKVDALTKIITGMNYDQFDKKRSVIEDTGRENAEREKFKKIISLYLTVIYHILKNIVNINARYVIGFHCVERDAQLYKEKGYDINLKKLEEKGFSSVTKLCAGIDETAPDKRKDVEKEMAERAKESIDSLESANPKLYANYIKYSDEKKAEEFTRQINREKAKTALNAYLRNTKWNVIIREDLLRIDNKTCTLFANKAVALEVARYVHAYINDIAEVNSYFQLYHYIMQRIIMNERYEKSSGKVSEYFDAVNDEKKYNDRLLKLLCVPFGYCIPRFKNLSIEALFDRNEAAKFDKEKKKVSGNSGSGPKKKRKV

SEQ ID NO: 78 - protein, 1232 aa, Artificial
  Synthetic ADAR2dd(465-700)(E488Q)-xten-dCasRx-NES
MEEPADRHPNRKARGQLRTKIESGQGTIPVRSNASIQTWDGVLQGERLLTMSCSDKIARWNVVGIQGSLLSIFVEPIYFSSIILGSLYHGDHLSRAMYQRISNIEDLPPLYTLNKPLLSGISNAEARQPGKAPNFSVNWTVGDSAIEVINATTGKDELGRASRLCKHALYCRWMRVHGKVPSHLLRSKITKPNVYHESKLAAKEYQAAKARLFTAFIKAGLGAWVEKPTEQDQFSLTSGSETPGTSESATPESIEKKKSFAKGMGVKSTLVSGSKVYMTTFAEGSDARLEKIVEGDSIRSVNEGEAFSAEMADKNAGYKIGNAKFSHPKGYAVVANNPLYTGPVQQDMLGLKETLEKRYFGESADGNDNICIQVIHNILDIEKILAEYITNAAYAVNNISGLDKDIIGFGKFSTVYTYDEFKDPEHHRAAFNNNDKLINAIKAQYDEFDNFLDNPRLGYFGQAFFSKEGRNYIINYGNECYDILALLSGLAHWVVANNEEESRISRTWLYNLDKNLDNEYISTLNYLYDRITNELTNSFSKNSAANVNYIAETLGINPAEFAEQYFRFSIMKEQKNLGFNITKLREVMLDRKDMSEIRKNHKVFDSIRTKVYTMMDFVIYRYYIEEDAKVAAANKSLPDNEKSLSEKDIFVINLRGSFNDDQKDALYYDEANRIWRKLENIMHNIKEFRGNKTREYKKKDAPRLPRILPAGRDVSAFSKLMYALTMFLDGKEINDLLTTLINKFDNIQSFLKVMPLIGVNAKFVEEYAFFKDSAKIADELRLIKSFARMGEPIADARRAMYIDAIRILGTNLSYDELKALADTFSLDENGNKLKKGKHGMRNFIINNVISNKRFHYLIRYGDPAHLHEIAKNEAVVKFVLGRIADIQKKQGQNGKNQIDRYYETCIGKDKGKSVSEKVDALTKIITGMNYDQFDKKRSVIEDTGRENAEREKFKKIISLYLTVIYHILKNIVNINARYVIGFHCVERDAQLYKEKGYDINLKKLEEKGFSSVTKLCAGIDETAPDKRKDVEKEMAERAKESIDSLESANPKLYANYIKYSDEKKAEEFTRQINREKAKTALNAYLRNTKWNVIIREDLLRIDNKTCTLFANKAVALEVARYVHAYINDIAEVNSYFQLYHYIMQRIIMNERYEKSSGKVSEYFDAVNDEKKYNDRLLKLLCVPFGYCIPRFKNLSIEALFDRNEAAKFDKEKKKVSGNSGSLQLPPLERLTL

SEQ ID NO: 79 - protein, 1273 aa, Artificial
  Synthetic NLS-dCas13b-NLS-xten-ADAR2dd(316-464)
MPKKKRKVNIPALVENQKKYFGTYSVMAMLNAQTVLDHIQKVADIEGEQNENNENLWFHPVMSHLYNAKNGYDKQPEKTMFIIERLQSYFPFLKIMAENQREYSNGKYKQNRVEVNSNDIFEVLKRAFGVLKMYRDLTNAYKTYEEKLNDGCEFLTSTEQPLSGMINNYYTVALRNMNERYGYKTEDLAFIQDKRFKFVKDAYGKKKSQVNTGFFLSLQDYNGDTQKKLHLSGVGIALLICLFLDKQYINIFLSRLPIFSSYNAQSEERRIIIRSFGINSIKLPKDRIHSEKSNKSVAMDMLNEVKRCPDELFTTLSAEKQSRFRIISDDHNEVLMKRSSDRFVPLLLQYIDYGKLFDHIRFHVNMGKLRYLLKADKTCIDGQTRVRVIEQPLNGFGRLEEAETMRKQENGTFGNSGIRIRDFENMKRDDANPANYPYIVDTYTHYILENNKVEMFINDKEDSAPLLPVIEDDRYVVKTIPSCRMSTLEIPAMAFHMFLFGSKKTEKLIVDVHNRYKRLFQAMQKEEVTAENIASFGIAESDLPQKILDLISGNAHGKDVDAFIRLTVDDMLTDTERRIKRFKDDRKSIRSADNKMGKRGFKQISTGKLADFLAKDIVLFQPSVNDGENKITGLNYRIMQSAIAVYDSGDDYEAKQQFKLMFEKARLIGKGTTEPHPFLYKVFARSIPANAVEFYERYLIERKFYLTGLSNEIKKGNRVDVPFIRRDQNKWKTPAMKTLGRIYSEDLPVELPRQMFDNEIKSHLKSLPQMEGIDFNNANVTYLIAEYMKRVLDDDFQTFYQWNRNYRYMDMLKGEYDRKGSLQHCFTSVEEREGLWKERASRTERYRKQASNKIRSNRQMRNASSEEIETILDKRLSNSRNEYQKSEKVIRRYRVQDALLFLLAKKTLTELADFDGERFKLKEIMPDAEKGILSEIMPMSFTFEKGGKKYTITSEGMKLKNYGDFFVLASDKRIGNLLELVGSDIVSKEDIMEEFNKYDQCRPEISSIVFNLEKWAFDTYPELSARVDREEKVDFKSILKILLNNKNINKEQSDILRKIRNAFDANNYPDKGVVEIKALPEIAMSIKKAFGEYAIMKGSLQPKKKRKVSGSETPGTSESATPESQLHLPQVLADAVSRLVLGKFGDLTDNFSSPHARRKVLAGVVMTTGTDVKDAKVISVSTGTKCINGEYMSDRGLALNDCHAEIISRRSLLRFLYTQLELYLNNKDDQKRSIFQKSERGGFRLKENVQFHLYISTSPCGDARIFSPHEPIL

SEQ ID NO: 80 - protein, 1268 aa, Artificial
  Synthetic dCas13b-NES-xten-ADAR2dd(316-464)
MNIPALVENQKKYFGTYSVMAMLNAQTVLDHIQKVADIEGEQNENNENLWFHPVMSHLYNAKNGYDKQPEKTMFIIERLQSYFPFLKIMAENQREYSNGKYKQNRVEVNSNDIFEVLKRAFGVLKMYRDLTNAYKTYEEKLNDGCEFLTSTEQPLSGMINNYYTVALRNMNERYGYKTEDLAFIQDKRFKFVKDAYGKKKSQVNTGFFLSLQDYNGDTQKKLHLSGVGIALLICLFLDKQYINIFLSRLPIFSSYNAQSEERRIIIRSFGINSIKLPKDRIHSEKSNKSVAMDMLNEVKRCPDELFTTLSAEKQSRFRIISDDHNEVLMKRSSDRFVPLLLQYIDYGKLFDHIRFHVNMGKLRYLLKADKTCIDGQTRVRVIEQPLNGFGRLEEAETMRKQENGTFGNSGIRIRDFENMKRDDANPANYPYIVDTYTHYILENNKVEMFINDKEDSAPLLPVIEDDRYVVKTIPSCRMSTLEIPAMAFHMFLFGSKKTEKLIVDVHNRYKRLFQAMQKEEVTAENIASFGIAESDLPQKILDLISGNAHGKDVDAFIRLTVDDMLTDTERRIKRFKDDRKSIRSADNKMGKRGFKQISTGKLADFLAKDIVLFQPSVNDGENKITGLNYRIMQSAIAVYDSGDDYEAKQQFKLMFEKARLIGKGTTEPHPFLYKVFARSIPANAVEFYERYLIERKFYLTGLSNEIKKGNRVDVPFIRRDQNKWKTPAMKTLGRIYSEDLPVELPRQMFDNEIKSHLKSLPQMEGIDFNNANVTYLIAEYMKRVLDDDFQTFYQWNRNYRYMDMLKGEYDRKGSLQHCFTSVEEREGLWKERASRTERYRKQASNKIRSNRQMRNASSEEIETILDKRLSNSRNEYQKSEKVIRRYRVQDALLFLLAKKTLTELADFDGERFKLKEIMPDAEKGILSEIMPMSFTFEKGGKKYTITSEGMKLKNYGDFFVLASDKRIGNLLELVGSDIVSKEDIMEEFNKYDQCRPEISSIVFNLEKWAFDTYPELSARVDREEKVDFKSILKILLNNKNINKEQSDILRKIRNAFDANNYPDKGVVEIKALPEIAMSIKKAFGEYAIMKGSLQLPPLERLTLSGSETPGTSESATPESQLHLPQVLADAVSRLVLGKFGDLTDNFSSPHARRKVLAGVVMTTGTDVKDAKVISVSTGTKCINGEYMSDRGLALNDCHAEIISRRSLLRFLYTQLELYLNNKDDQKRSIFQKSERGGFRLKENVQFHLYISTSPCGDARIFSPHEPIL

SEQ ID NO: 81 - protein, 805 aa, Homo sapiens [sequence omitted]

SEQ ID NO: 82 - protein, 492 aa, Homo sapiens
MALNSGSPPAIGPYYENHGYQPENPYPAQPTVVPTVYEVHPAQYYPSPVPQYAPRVLTQASNPVVCTQPKSPSGTVCTSKTKKALCITLTLGTFLVGAALAAGLLWKFMGSKCSNSGIECDSSGTCINPSNWCDGVSHCPGGEDENRCVRLYGPNFILQVYSSQRKSWHPVCQDDWNENYGRAACRDMGYKNNFYSSQGIVDDSGSTSFMKLNTSAGNVDIYKKLYHSDACSSKAVVSLRCIACGVNLNSSRQSRIVGGESALPGAWPWQVSLHVQNVHVCGGSIITPEWIVTAAHCVEKPLNNPWHWTAFAGILRQSFMFYGAGYQVEKVISHPNYDSKTKNNDIALMKLQKPLTFNDLVKPVCLPNPGMMLQPEQLCWISGWGATEEKGKTSEVLNAAKVLLIETQRCNSRYVYDNLITPAMICAGFLQGNVDSCQGDSGGPLVTSKNNIWWLIGDTSWGSGCAKAYRPGVYGNVMVFTDWIYRQMRADG

SEQ ID NO: 83 - protein, 472 aa, Homo sapiens
MTTCSRQFTSSSSMKGSCGIGGGIGGGSSRISSVLAGGSCRAPSTYGGGLSVSSSRFSSGGACGLGGGYGGGFSSSSSSFGSGFGGGYGGGLGAGLGGGFGGGFAGGDGLLVGSEKVTMQNLNDRLASYLDKVRALEEANADLEVKIRDWYQRQRPAEIKDYSPYFKTIEDLRNKILTATVDNANVLLQIDNARLAADDFRTKYETELNLRMSVEADINGLRRVLDELTLARADLEMQIESLKEELAYLKKNHEEEMNALRGQVGGDVNVEMDAAPGVDLSRILNEMRDQYEKMAEKNRKDAEEWFFTKTEELNREVATNSELVQSGKSEISELRRTMQNLEIELQSQLSMKASLENSLEETKGRYCMQLAQIQEMIGSVEEQLAQLRCEMEQQNQEYKILLDVKTRLEQEIATYRRLLEGEDAHLSSSQFSSGSQSSRDVTSSSRQIRTKVMDVHDGKVVSTHEQVLRTKN

SEQ ID NO: 84 - protein, 1836 aa, Homo sapiens
MARPSLCTLVPLGPECLRPFTRESLAAIEQRAVEEEARLQRNKQMEIEEPERKPRSDLEAGKNLPMIYGDPPPEVIGIPLEDLDPYYSNKKTFIVLNKGKAIFRFSATPALYLLSPFSVVRRGAIKVLIHALFSMFIMITILTNCVFMTMSDPPPWSKNVEYTFTGIYTFESLIKILARGFCVDDFTFLRDPWNWLDFSVIMMAYLTEFVDLGNISALRTFRVLRALKTITVIPGLKTIVGALIQSVKKLSDVMILTVFCLSVFALVGLQLFMGNLRQKCVRWPPPFNDTNTTWYSNDTWYGNDTWYGNEMWYGNDSWYANDTWNSHASWATNDTFDWDAYISDEGNFYFLEGSNDALLCGNSSDAGHCPEGYECIKTGRNPNYGYTSYDTFSWAFLALFRLMTQDYWENLFQLTLRAAGKTYMIFFVVIIFLGSFYLINLILAVVAMAYAEQNEATLAEDKEKEEEFQQMLEKFKKHQEELEKAKAAQALEGGEADGDPAHGKDCNGSLDTSQGEKGAPRQSSSGDSGISDAMEELEEAHQKCPPWWYKCAHKVLIWNCCAPWLKFKNIIHLIVMDPFVDLGITICIVLNTLFMAMEHYPMTEHFDNVLTVGNLVFTGIFTAEMVLKLIAMDPYEYFQQGWNIFDSIIVTLSLVELGLANVQGLSVLRSFRLLRVFKLAKSWPTLNMLIKIIGNSVGALGNLTLVLAIIVFIFAVVGMQLFGKSYKECVCKIALDCNLPRWHMHDFFHSFLIVFRILCGEWIETMWDCMEVAGQAMCLTVFLMVMVIGNLVVLNLFLALLLSSFSADSLAASDEDGEMNNLQIAIGRIKLGIGFAKAFLLGLLHGKILSPKDIMLSLGEADGAGEAGEAGETAPEDEKKEPPEEDLKKDNHILNHMGLADGPPSSLELDHLNFINNPYLTIQVPIASEESDLEMPTEEETDTFSEPEDSKKPPQPLYDGNSSVCSTADYKPPEEDPEEQAEENPEGEQPEECFTEACVQRWPCLYVDISQGRGKKWWTLRRACFKIVEHNWFETFIVFMILLSSGALAFEDIYIEQRRVIRTILEYADKVFTYIFIMEMLLKWVAYGFKVYFTNAWCWLDFLIVDVSIISLVANWLGYSELGPIKSLRTLRALRPLRALSRFEGMRVVVNALLGAIPSIMNVLLVCLIFWLIFSIMGVNLFAGKFYYCINTTTSERFDISEVNNKSECESLMHTGQVRWLNVKVNYDNVGLGYLSLLQVATFKGWMDIMYAAVDSREKEEQPQYEVNLYMYLYFVIFIIFGSFFTLNLFIGVIIDNFNQQKKKLGGKDIFMTEEQKKYYNAMKKLGSKKPQKPIPRPQNKIQGMVYDLVTKQAFDITIMILICLNMVTMMVETDNQSQLKVDILYNINMIFIIIFTGECVLKMLALRQYYFTVGWNIFDFVVVILSIVGLALSDLIQKYFVSPTLFRVIRLARIGRVLRLIRGAKGIRTLLFALMMSLPALFNIGLLLFLVMFIYSIFGMSNFAYVKKESGIDDMFNFETFGNSIICLFEITTSAGWDGLLNPILNSGPPDCDPNLENPGTSVKGDCGNPSIGICFFCSYIIISFLIVVNMYIAIILENFNVATEESSEPLGEDDFEMFYETWEKFDPDATQFIAYSRLSDFVDTLQEPLRIAKPNKIKLITLDLPMVPGDKIHCLDILFALTKEVLGDSGEMDALKQTMEEKFMAANPSKVSYEPITTTLKRKHEEVCAIKIQRAYRRHLLQRSMKQASYMYRHSHDGSGDDAPEKEGLLANTMSKMYGHENGNSSSPSPEEKGEAGDAGPTMGLMPISPSDTAWPPAPPPGQTVRPGVKESLV

SEQ ID NO: 85 - DNA, 56 bp, Artificial
  Synthetic ACE2-K31-Rx-26-7 gRNA
aacccctaccaactggtcggggtttgaaactaaactcgtccaaaaatgtcttggcc

SEQ ID NO: 86 - DNA, 56 bp, Artificial
  Synthetic ACE2-K31-Rx-26-9 gRNA
aacccctaccaactggtcggggtttgaaacgttaaactcgtccaaaaatgtcttgg

SEQ ID NO: 87 - DNA, 56 bp, Artificial
  Synthetic ACE2-K31-Rx-26-11 gRNA
aacccctaccaactggtcggggtttgaaactggttaaactcgtccaaaaatgtctt

SEQ ID NO: 88 - DNA, 56 bp, Artificial
  Synthetic ACE2-K31-Rx-26-13 gRNA
aacccctaccaactggtcggggtttgaaaccgtggttaaactcgtccaaaaatgtc

SEQ ID NO: 89 - DNA, 56 bp, Artificial
  Synthetic ACE2-K31-Rx-26-15 gRNA
aacccctaccaactggtcggggtttgaaacttcgtggttaaactcgtccaaaaatg

SEQ ID NO: 90 - DNA, 134 bp, Artificial
  Synthetic ACE2-K31-Rx-dd5'-68-11 gRNA
aacccctaccaactggtcggggtttgaaactggttaaactcgtccaaaaatgtcttggcctgttcctcaatggtggcaagtaaacccctaccaactggtcggggtttgaaacactgagcagcagttacagcaac

SEQ ID NO: 91 - DNA, 134 bp, Artificial
  Synthetic ACE2-K31-Rx-dd5'-68-11M gRNA
aacccctaccaactggtcggggtttgaaactggttaaactcgtccaaaaatgtcggggccgggtcctcaatggtggcaagtaaacccctaccaactggtcggggtttgaaacactgagcagcagttacagcaac

SEQ ID NO: 92 - DNA, 121 bp, Artificial
  Synthetic ACE2-K31-Rx-dd3'-55-11 gRNA
aacccctaccaactggtcggggtttgaaacaactttgatagaacaggtcttcggcttcgcaagtaaacccctaccaactggtcggggtttgaaactggttaaactcgtccaaaaatgtctt

SEQ ID NO: 93 - DNA, 56 bp, Artificial
  Synthetic ACE2-K353-Rx-26-7 gRNA
aacccctaccaactggtcggggtttgaaaccgccctcccccaggtcccaagctgtg

SEQ ID NO: 94 - DNA, 56 bp, Artificial
  Synthetic ACE2-K353-Rx-26-9 gRNA
aacccctaccaactggtcggggtttgaaacgtcgccctcccccaggtcccaagctg

SEQ ID NO: 95 - DNA, 56 bp, Artificial
  Synthetic ACE2-K353-Rx-26-11 gRNA
aacccctaccaactggtcggggtttgaaacaagtcgccctcccccaggtcccaagc

SEQ ID NO: 96 - DNA, 56 bp, Artificial
  Synthetic ACE2-K353-Rx-26-13 gRNA
aacccctaccaactggtcggggtttgaaactgaagtcgccctcccccaggtcccaa

SEQ ID NO: 97 - DNA, 56 bp, Artificial
  Synthetic ACE2-K353-Rx-26-15 gRNA
aacccctaccaactggtcggggtttgaaaccctgaagtcgccctcccccaggtccc

SEQ ID NO: 98 - DNA, 134 bp, Artificial
  Synthetic ACE2-K353-Rx-dd5'-68-11 gRNA
aacccctaccaactggtcggggtttgaaacaagtcgccctcccccaggtcccaagctgtgggatggcagactgcttcaagtaaacccctaccaactggtcggggtttgaaactctgaacatttcctgggtccgt

SEQ ID NO: 99 - DNA, 147 bp, Artificial
  Synthetic ACE2-K353-Rx-dd3'-81-11 gRNA
aacccctaccaactggtcggggtttgaaacatgatgagctgtcaggaagtcgtccattgtcacctttgtgcacataaggatcctgcaagtaaacccctaccaactggtcggggtttgaaacaagtcgccctcccccaggtcccaagc

SEQ ID NO: 100 - DNA, 123 bp, Artificial
  Synthetic ACE2-K353-Rx-ddm-57-26 gRNA
aacccctaccaactggtcggggtttgaaaccacataaggatcctgaagtcgccctcccccaggtccaagtaaacccctaccaactggtcggggtttgaaacccaagctgtgggatggcagact

SEQ ID NO: 101 - DNA, 56 bp, Artificial
  Synthetic ACE2-D30-K31-Rx-26-7-9 gRNA
aacccctaccaactggtcggggtttgaaactaaactcgcccaaaaatgtcttggcc

SEQ ID NO: 102 - DNA, 56 bp, Artificial
  Synthetic ACE2-D30-K31-Rx-26-9-11 gRNA
aacccctaccaactggtcggggtttgaaacgttaaactcgcccaaaaatgtcttgg

SEQ ID NO: 103 - DNA, 56 bp, Artificial
  Synthetic ACE2-D30-K31-Rx-26-11-13 gRNA
aacccctaccaactggtcggggtttgaaactggttaaactcgcccaaaaatgtctt

SEQ ID NO: 104 - DNA, 56 bp, Artificial
  Synthetic ACE2-D30-K31-Rx-26-13-15 gRNA
aacccctaccaactggtcggggtttgaaaccgtggttaaactcgcccaaaaatgtc

SEQ ID NO: 105 - DNA, 56 bp, Artificial
  Synthetic ACE2-D38-Rx-26-11 gRNA
aacccctaccaactggtcggggtttgaaacatagaacaggccttcggcttcgtggt

SEQ ID NO: 106 - DNA, 56 bp, Artificial
  Synthetic ACE2-D38-Rx-26-13 gRNA
aacccctaccaactggtcggggtttgaaactgatagaacaggccttcggcttcgtg

SEQ ID NO: 107 - DNA, 56 bp, Artificial
  Synthetic ACE2-D38-Rx-26-15 gRNA
aacccctaccaactggtcggggtttgaaactttgatagaacaggccttcggcttcg

SEQ ID NO: 108 - DNA, 56 bp, Artificial
  Synthetic TMPRSS2-S441-Rx-26-7 gRNA
aacccctaccaactggtcggggtttgaaacctccaccgtcaccctggcaagaatcg

SEQ ID NO: 109 - DNA, 56 bp, Artificial
  Synthetic TMPRSS2-S441-Rx-26-9 gRNA
aacccctaccaactggtcggggtttgaaacccctccaccgtcaccctggcaagaat

SEQ ID NO: 110 - DNA, 56 bp, Artificial
  Synthetic TMPRSS2-S441-Rx-26-11 gRNA
aacccctaccaactggtcggggtttgaaacggccctccaccgtcaccctggcaaga

SEQ ID NO: 111 - DNA, 56 bp, Artificial
  Synthetic TMPRSS2-S441-Rx-26-13 gRNA
aacccctaccaactggtcggggtttgaaacgaggccctccaccgtcaccctggcaa

SEQ ID NO: 112 - DNA, 56 bp, Artificial
  Synthetic TMPRSS2-S441-Rx-26-15 gRNA
aacccctaccaactggtcggggtttgaaaccagaggccctccaccgtcaccctggc

SEQ ID NO: 113 - DNA, 142 bp, Artificial
  Synthetic TMPRSS2-S441-Rx-dd5'-76-11 gRNA
aacccctaccaactggtcggggtttgaaacggccctccaccgtcaccctggcaagaatcgacgttcccctgcaggaagccggcacaagtaaacccctaccaactggtcggggtttgaaaccagatcatggctggtgtgatca

SEQ ID NO: 114 - DNA, 142 bp, Artificial
  Synthetic TMPRSS2-S441-Rx-dd5'-76-11M gRNA
aacccctaccaactggtcggggtttgaaacggccctccaccgtcacccgggcaagaagcgacgggccccggcaggaagccggcacaagtaaacccctaccaactggtcggggtttgaaaccagatcatggctggtgtgatca

SEQ ID NO: 115 - DNA, 140 bp, Artificial
  Synthetic TMPRSS2-S441-Rx-dd3'-74-11 gRNA
aacccctaccaactggtcggggtttgaaaccttgtatcccctatcagccaccagatattgttcttcgaagtgaccagacaagtaaacccctaccaactggtcggggtttgaaacggccctccaccgtcaccctggcaaga

SEQ ID NO: 116 - DNA, 140 bp, Artificial
  Synthetic TMPRSS2-S441-Rx-dd3'-74-11M gRNA
aacccctaccaactggtcggggtttgaaaccttgtatccccgatcagccaccagagaggggtcgtcgaagtgaccagacaagtaaacccctaccaactggtcggggtttgaaacggccctccaccgtcaccctggcaaga

SEQ ID NO: 117 - DNA, 56 bp, Artificial
  Synthetic KRT14-R125-Rx-26-7 gRNA
aacccctaccaactggtcggggtttgaaacgccaggcggtcattgaggttctgcat

SEQ ID NO: 118 - DNA, 56 bp, Artificial
  Synthetic KRT14-R125-Rx-26-9 gRNA
aacccctaccaactggtcggggtttgaaacaggccaggcggtcattgaggttctgc

SEQ ID NO: 119 - DNA, 56 bp, Artificial
  Synthetic KRT14-R125-Rx-26-11 gRNA
aacccctaccaactggtcggggtttgaaacggaggccaggcggtcattgaggttct

SEQ ID NO: 120 - DNA, 56 bp, Artificial
  Synthetic KRT14-R125-Rx-26-13 gRNA
aacccctaccaactggtcggggtttgaaactaggaggccaggcggtcattgaggtt

SEQ ID NO: 121 - DNA, 56 bp, Artificial
  Synthetic KRT14-R125-Rx-26-15 gRNA
aacccctaccaactggtcggggtttgaaacggtaggaggccaggcggtcattgagg

SEQ ID NO: 122 - DNA, 120 bp, Artificial
  Synthetic KRT14-R125-Rx-dd5'-54-11 gRNA
aacccctaccaactggtcggggtttgaaacggaggccaggcggtcattgaggttctgcatggcaagtaaacccctaccaactggtcggggtttgaaactcaccttctcactgcccaccag

SEQ ID NO: 123 - DNA, 124 bp, Artificial
  Synthetic KRT14-R125-Rx-dd3'-58-11 gRNA
aacccctaccaactggtcggggtttgaaacgcctcctccagagcacgcaccttgtccaggtacaagtaaacccctaccaactggtcggggtttgaaacggaggccaggcggtcattgaggttct

SEQ ID NO: 124 - DNA, 56 bp, Artificial
  Synthetic SCN4A-1244-Rx-26-7 gRNA
aacccctaccaactggtcggggtttgaaaccaacccctgaaggtggccacctgcag

SEQ ID NO: 125 - DNA, 56 bp, Artificial
  Synthetic SCN4A-1244-Rx-26-9 gRNA
aacccctaccaactggtcggggtttgaaactccaacccctgaaggtggccacctgc

SEQ ID NO: 126 - DNA, 56 bp, Artificial
  Synthetic SCN4A-1244-Rx-26-11 gRNA
aacccctaccaactggtcggggtttgaaaccatccaacccctgaaggtggccacct

SEQ ID NO: 127 - DNA, 56 bp, Artificial
  Synthetic SCN4A-1244-Rx-26-13 gRNA
aacccctaccaactggtcggggtttgaaactccatccaacccctgaaggtggccac

SEQ ID NO: 128 - DNA, 56 bp, Artificial
  Synthetic SCN4A-1244-Rx-26-15 gRNA
aacccctaccaactggtcggggtttgaaactgtccatccaacccctgaaggtggcc

SEQ ID NO: 129 - DNA, 136 bp, Artificial
  Synthetic SCN4A-1244-Rx-dd5'-70-11 gRNA
aacccctaccaactggtcggggtttgaaaccatccaacccctgaaggtggccacctgcaggagggagaggtagcccagcaagtaaacccctaccaactggtcggggtttgaaacacccacgttgtcgtagttgacc

SEQ ID NO: 130 - DNA, 132 bp, Artificial
  Synthetic SCN4A-1244-Rx-dd3'-66-11 gRNA
aacccctaccaactggtcggggtttgaaaccctccttctcccgggagtccacggctgcatacatgatgtccaagtaaacccctaccaactggtcggggtttgaaaccatccaacccctgaaggtggccacct

SEQ ID NO: 131 - DNA, 138 bp, Artificial
  Synthetic SCN4A-1244-Rx-dd5'-72-13 gRNA
aacccctaccaactggtcggggtttgaaactccatccaacccctgaaggtggccacctgcaggagggagaggtagcccagcaagtaaacccctaccaactggtcggggtttgaaacacccacgttgtcgtagttgacc

SEQ ID NO: 132 - DNA, 130 bp, Artificial
  Synthetic SCN4A-1244-Rx-dd3'-64-13 gRNA
aacccctaccaactggtcggggtttgaaaccctccttctcccgggagtccacggctgcatacatgatgcaagtaaacccctaccaactggtcggggtttgaaactccatccaacccctgaaggtggccac

SEQ ID NO: 133 - RNA, 50 nt, Artificial
  Non-targeting gRNA
aaaugacugaauauaaacuugugguaguuggagcugguggcguaggcaag

SEQ ID NO: 134 - RNA, 50 nt, Artificial
  Synthetic gRNA
cuugccuacgccaccagcuccaaccaccacaaguuuauauucagucauuu

SEQ ID NO: 135 - RNA, 50 nt, Artificial
  Synthetic gRNA
cuugccuacgccaccagcgccaaccaccacaaguuuauauucagucauuu

SEQ ID NO: 136 - RNA, 50 nt, Artificial
  Synthetic gRNA
cuugccgacgccaccagcgccaaccaccacaaguuuauauucagucauuu

SEQ ID NO: 137 - RNA, 50 nt, Artificial
  Synthetic gRNA
cgugccgacgccaccagcgccaaccaccacaaguuuauauucagucauuu

SEQ ID NO: 138 - RNA, 50 nt, Artificial
  Non-targeting gRNA
aaacaguggauaauuuuguggccuuagcuacaggagagaaaggauuuggc

SEQ ID NO: 139 - RNA, 49 nt, Artificial
  Synthetic gRNA
gccaaauccuuucucuccuguagccaaggccacaaaauuauccauguuu

SEQ ID NO: 140 - RNA, 49 nt, Artificial
  Synthetic gRNA
gccaaauccuuucucuccgguagccaaggccacaaaauuauccauguuu

SEQ ID NO: 141 - RNA, 49 nt, Artificial
  Synthetic gRNA
gccaaauccugucucuccuguagccaaggccacaaaauuauccauguuu

SEQ ID NO: 142 - RNA, 49 nt, Artificial
  Synthetic gRNA
gccaaauccguucucuccuguagccaaggccacaaaauuauccauguuu

SEQ ID NO: 143 - RNA, 49 nt, Artificial
  Synthetic gRNA
gccaaauccggucucuccuguagccaaggccacaaaauuauccauguuu

SEQ ID NO: 144 - RNA, 49 nt, Artificial
  Synthetic gRNA
gccaaauccggucucuccgguagccaaggccacaaaauuauccauguuu

SEQ ID NO: 145 - DNA, 5989 bp, Homo sapiens
tacgcccgtctgaagaagaatcgagcgcggaacgcatcgatagctctgccctctgcggccgcccggccccgaactcatcggtgtgctcggagctcgattttcctaggcggcggccgcggcggcggaggcagcagcggcggcggcagtggcggcggcgaaggtggcggcggctcggccagtactcccggcccccgccatttcggactgggagcgagcgcggcgcaggcactgaaggcggcggcggggccagaggctcagcggctcccaggtgcgggagagaggcctgctgaaaatgactgaatataaacttgtggtagttggagctggtggcgtaggcaagagtgccttgacgatacagctaattcagaatcattttgtggacgaatatgatccaacaatagaggattcctacaggaagcaagtagtaattgatggagaaacctgtctcttggatattctcgacacagcaggtcaagaggagtacagtgcaatgagggaccagtacatgaggactggggagggctttctttgtgtatttgccataaataatactaaatcatttgaagatattcaccattatagagaacaaattaaaagagttaaggactctgaagatgtacctatggtcctagtaggaaataaatgtgatttgccttctagaacagtagacacaaaacaggctcaggacttagcaagaagttatggaattccttttattgaaacatcagcaaagacaagacagagagtggaggatgctttttatacattggtgagggagatccgacaatacagattgaaaaaaatcagcaaagaagaaaagactcctggctgtgtgaaaattaaaaaatgcattataatgtaatctgggtgttgatgatgccttctatacattagttcgagaaattcgaaaacataaagaaaagatgagcaaagatggtaaaaagaagaaaaagaagtcaaagacaaagtgtgtaattatgtaaatacaatttgtacttttttcttaaggcatactagtacaagtggtaatttttgtacattacactaaattattagcatttgttttagcattacctaatttttttcctgctccatgcagactgttagcttttaccttaaatgcttattttaaaatgacagtggaagtttttttttcctctaagtgccagtattcccagagttttggtttttgaactagcaatgcctgtgaaaaagaaactgaatacctaagatttctgtcttggggtttttggtgcatgcagttgattacttcttatttttcttaccaattgtgaatgttggtgtgaaacaaattaatgaagcttttgaatcatccctattctgtgttttatctagtcacataaatggattaattactaatttcagttgagaccttctaattggtttttactgaaacattgagggaacacaaatttatgggcttcctgatgatgattcttctaggcatcatgtcctatagtttgtcatccctgatgaatgtaaagttacactgttcacaaaggttttgtctcctttccactgctattagtcatggtcactctccccaaaatattatattttttctataaaaagaaaaaaatggaaaaaaattacaaggcaatggaaactattataaggccatttccttttcacattagataaattactataaagactcctaatagcttttcctgttaaggcagacccagtatgaaatggggattattatagcaaccattttggggctatatttacatgctactaaatttttataataattgaaaagattttaacaagtataaaaaattctcataggaattaaatgtagtctccctgtgtcagactgctctttcatagtataactttaaatcttttcttcaacttgagtctttgaagatagttttaattctgcttgtgacattaaaagattatttgggccagttatagcttattaggtgttgaagagaccaaggttgcaaggccaggccctgtgtgaacctttgagctttcatagagagtttcacagcatggactgtgtccccacggtcatccagtgttgtcatgcattggttagtcaaaatggggagggactagggcagtttggatagctcaacaagatacaatctcactctgtggtggtcctgctgacaaatcaagagcattgcttttgtttcttaagaaaacaaactcttttttaaaaattacttttaaatattaactcaaaagttgagattttggggtggtggtgtgccaagacattaattttttttttaaacaatgaagtgaaaaagttttacaatctctaggtttggctagttctcttaacactggttaaattaacattgcataaacacttttcaagtctgatccatatttaataatgctttaaaataaaaataaaaacaatccttttgataaatttaaaatgttacttattttaaaataaatgaagtgagatggcatggtgaggtgaaagtatcactggactaggaagaaggtgacttaggttctagataggtgtcttttaggactctgattttgaggacatcacttactatccatttcttcatgttaaaagaagtcatctcaaactcttagttttttttttttacaactatgtaatttatattccatttacataaggatacacttatttgtcaagctcagcacaatctgtaaatttttaacctatgttacaccatcttcagtgccagtcttgggcaaaattgtgcaagaggtgaagtttatatttgaatatccattctcgttttaggactcttcttccatattagtgtcatcttgcctccctaccttccacatgccccatgacttgatgcagttttaatacttgtaattcccctaaccataagatttactgctgctgtggatatctccatgaagttttcccactgagtcacatcagaaatgccctacatcttatttcctcagggctcaagagaatctgacagataccataaagggatttgacctaatcactaattttcaggtggtggctgatgctttgaacatctctttgctgcccaatccattagcgacagtaggatttttcaaacctggtatgaatagacagaaccctatccagtggaaggagaatttaataaagatagtgctgaaagaattccttaggtaatctataactaggactactcctggtaacagtaatacattccattgttttagtaaccagaaatcttcatgcaatgaaaaatactttaattcatgaagcttactttttttttttggtgtcagagtctcgctcttgtcacccaggctggaatgcagtggcgccatctcagctcactgcaacctccatctcccaggttcaagcgattctcgtgcctcggcctcctgagtagctgggattacaggcgtgtgccactacactcaactaatttttgtatttttaggagagacggggtttcaccctgttggccaggctggtctcgaactcctgacctcaagtgattcacccaccttggcctcataaacctgttttgcagaactcatttattcagcaaatatttattgagtgcctaccagatgccagtcaccgcacaaggcactgggtatatggtatccccaaacaagagacataatcccggtccttaggtagtgctagtgtggtctgtaatatcttactaaggcctttggtatacgacccagagataacacgatgcgtattttagttttgcaaagaaggggtttggtctctgtgccagctctataattgttttgctacgattccactgaaactcttcgatcaagctactttatgtaaatcacttcattgttttaaaggaataaacttgattatattgtttttttatttggcataactgtgattcttttaggacaattactgtacacattaaggtgtatgtcagatattcatattgacccaaatgtgtaatattccagttttctctgcataagtaattaaaatatacttaaaaattaatagttttatctgggtacaaataaacaggtgcctgaactagttcacagacaaggaaacttctatgtaaaaatcactatgatttctgaattgctatgtgaaactacagatctttggaacactgtttaggtagggtgttaagacttacacagtacctcgtttctacacagagaaagaaatggccatacttcaggaactgcagtgcttatgaggggatatttaggcctcttgaatttttgatgtagatgggcatttttttaaggtagtggttaattacctttatgtgaactttgaatggtttaacaaaagatttgtttttgtagagattttaaagggggagaattctagaaataaatgttacctaattattacagccttaaagacaaaaatccttgttgaagtttttttaaaaaaagctaaattacatagacttaggcattaacatgtttgtggaagaatatagcagacgtatattgtatcatttgagtgaatgttcccaagtaggcattctaggctctatttaactgagtcacactgcataggaatttagaacctaacttttataggttatcaaaactgttgtcaccattgcacaattttgtcctaatatatacatagaaactttgtggggcatgttaagttacagtttgcacaagttcatctcatttgtattccattgattttttttttcttctaaacattttttcttcaaacagtatataactttttttaggggatttttttttagacagcaaaaactatctgaagatttccatttgtcaaaaagtaatgatttcttgataattgtgtagtaatgttttttagaacccagcagttaccttaaagctgaatttatatttagtaacttctgtgttaatactggatagcatgaattctgcattgagaaactgaatagctgtcataaaatgaaactttctttctaaagaaagatactcacatgagttcttgaagaatagtcataactagattaagatctgtgttttagtttaatagtttgaagtgcctgtttgggataatgataggtaatttagatgaatttaggggaaaaaaaagttatctgcagatatgttgagggcccatctctccccccacacccccacagagctaactgggttacagtgttttatccgaaagtttccaattccactgtcttgtgttttcatgttgaaaatacttttgcatttttcctttgagtgccaatttcttactagtactatttcttaatgtaacatgtttacctggaatgtattttaactatttttgtatagtgtaaactgaaacatgcacattttgtacattgtgctttcttttgtgggacatatgcagtgtgatccagttgttttccatcatttggttgcgctgacctaggaatgttggtcatatcaaacattaaaaatgaccactcttttaattgaaattaacttttaaatgtttataggagtatgtgctgtgaagtgatctaaaatttgtaatatttttgtcatgaactgtactactcctaattattgtaatgtaataaaaatagttacagtgactatgagtgtgtatttattcatgaaatttgaactgtttgccccgaaatggatatggaatactttataagccatagacactatagtataccagtgaatcttttatgcagcttgttagaagtatcctttatttctaaaaggtgctgtggatattatgtaaaggcgtgtttgcttaaacttaaaaccatatttagaagtagatgcaaaacaaatctgcctttatgacaaaaaaataggataacattatttatttatttccttttatcaaagaaggtaattgatacacaacaggtgacttggttttaggcccaaaggtagcagcagcaacattaataatggaaataattgaatagttagttatgtatgttaatgccagtcaccagcaggctatttcaaggtcagaagtaatgactccatacatattatttatttctataactacatttaaatcattaccagg

SEQ ID NO: 146 - DNA, 5865 bp, Homo sapiens
tacgcccgtctgaagaagaatcgagcgcggaacgcatcgatagctctgccctctgcggccgcccggccccgaactcatcggtgtgctcggagctcgattttcctaggcggcggccgcggcggcggaggcagcagcggcggcggcagtggcggcggcgaaggtggcggcggctcggccagtactcccggcccccgccatttcggactgggagcgagcgcggcgcaggcactgaaggcggcggcggggccagaggctcagcggctcccaggtgcgggagagaggcctgctgaaaatgactgaatataaacttgtggtagttggagctggtggcgtaggcaagagtgccttgacgatacagctaattcagaatcattttgtggacgaatatgatccaacaatagaggattcctacaggaagcaagtagtaattgatggagaaacctgtctcttggatattctcgacacagcaggtcaagaggagtacagtgcaatgagggaccagtacatgaggactggggagggctttctttgtgtatttgccataaataatactaaatcatttgaagatattcaccattatagagaacaaattaaaagagttaaggactctgaagatgtacctatggtcctagtaggaaataaatgtgatttgccttctagaacagtagacacaaaacaggctcaggacttagcaagaagttatggaattccttttattgaaacatcagcaaagacaagacagggtgttgatgatgccttctatacattagttcgagaaattcgaaaacataaagaaaagatgagcaaagatggtaaaaagaagaaaaagaagtcaaagacaaagtgtgtaattatgtaaatacaatttgtacttttttcttaaggcatactagtacaagtggtaatttttgtacattacactaaattattagcatttgttttagcattacctaatttttttcctgctccatgcagactgttagcttttaccttaaatgcttattttaaaatgacagtggaagtttttttttcctctaagtgccagtattcccagagttttggtttttgaactagcaatgcctgtgaaaaagaaactgaatacctaagatttctgtcttggggtttttggtgcatgcagttgattacttcttatttttcttaccaattgtgaatgttggtgtgaaacaaattaatgaagcttttgaatcatccctattctgtgttttatctagtcacataaatggattaattactaatttcagttgagaccttctaattggtttttactgaaacattgagggaacacaaatttatgggcttcctgatgatgattcttctaggcatcatgtcctatagtttgtcatccctgatgaatgtaaagttacactgttcacaaaggttttgtctcctttccactgctattagtcatggtcactctccccaaaatattatattttttctataaaaagaaaaaaatggaaaaaaattacaaggcaatggaaactattataaggccatttccttttcacattagataaattactataaagactcctaatagcttttcctgttaaggcagacccagtatgaaatggggattattatagcaaccattttggggctatatttacatgctactaaatttttataataattgaaaagattttaacaagtataaaaaattctcataggaattaaatgtagtctccctgtgtcagactgctctttcatagtataactttaaatcttttcttcaacttgagtctttgaagatagttttaattctgcttgtgacattaaaagattatttgggccagttatagcttattaggtgttgaagagaccaaggttgcaaggccaggccctgtgtgaacctttgagctttcatagagagtttcacagcatggactgtgtccccacggtcatccagtgttgtcatgcattggttagtcaaaatggggagggactagggcagtttggatagctcaacaagatacaatctcactctgtggtggtcctgctgacaaatcaagagcattgcttttgtttcttaagaaaacaaactcttttttaaaaattacttttaaatattaactcaaaagttgagattttggggtggtggtgtgccaagacattaattttttttttaaacaatgaagtgaaaaagttttacaatctctaggtttggctagttctcttaacactggttaaattaacattgcataaacacttttcaagtctgatccatatttaataatgctttaaaataaaaataaaaacaatccttttgataaatttaaaatgttacttattttaaaataaatgaagtgagatggcatggtgaggtgaaagtatcactggactaggaagaaggtgacttaggttctagataggtgtcttttaggactctgattttgaggacatcacttactatccatttcttcatgttaaaagaagtcatctcaaactcttagttttttttttttacaactatgtaatttatattccatttacataaggatacacttatttgtcaagctcagcacaatctgtaaatttttaacctatgttacaccatcttcagtgccagtcttgggcaaaattgtgcaagaggtgaagtttatatttgaatatccattctcgttttaggactcttcttccatattagtgtcatcttgcctccctaccttccacatgccccatgacttgatgcagttttaatacttgtaattcccctaaccataagatttactgctgctgtggatatctccatgaagttttcccactgagtcacatcagaaatgccctacatcttatttcctcagggctcaagagaatctgacagataccataaagggatttgacctaatcactaattttcaggtggtggctgatgctttgaacatctctttgctgcccaatccattagcgacagtaggatttttcaaacctggtatgaatagacagaaccctatccagtggaaggagaatttaataaagatagtgctgaaagaattccttaggtaatctataactaggactactcctggtaacagtaatacattccattgttttagtaaccagaaatcttcatgcaatgaaaaatactttaattcatgaagcttactttttttttttggtgtcagagtctcgctcttgtcacccaggctggaatgcagtggcgccatctcagctcactgcaacctccatctcccaggttcaagcgattctcgtgcctcggcctcctgagtagctgggattacaggcgtgtgccactacactcaactaatttttgtatttttaggagagacggggtttcaccctgttggccaggctggtctcgaactcctgacctcaagtgattcacccaccttggcctcataaacctgttttgcagaactcatttattcagcaaatatttattgagtgcctaccagatgccagtcaccgcacaaggcactgggtatatggtatccccaaacaagagacataatcccggtccttaggtagtgctagtgtggtctgtaatatcttactaaggcctttggtatacgacccagagataacacgatgcgtattttagttttgcaaagaaggggtttggtctctgtgccagctctataattgttttgctacgattccactgaaactcttcgatcaagctactttatgtaaatcacttcattgttttaaaggaataaacttgattatattgtttttttatttggcataactgtgattcttttaggacaattactgtacacattaaggtgtatgtcagatattcatattgacccaaatgtgtaatattccagttttctctgcataagtaattaaaatatacttaaaaattaatagttttatctgggtacaaataaacaggtgcctgaactagttcacagacaaggaaacttctatgtaaaaatcactatgatttctgaattgctatgtgaaactacagatctttggaacactgtttaggtagggtgttaagacttacacagtacctcgtttctacacagagaaagaaatggccatacttcaggaactgcagtgcttatgaggggatatttaggcctcttgaatttttgatgtagatgggcatttttttaaggtagtggttaattacctttatgtgaactttgaatggtttaacaaaagatttgtttttgtagagattttaaagggggagaattctagaaataaatgttacctaattattacagccttaaagacaaaaatccttgttgaagtttttttaaaaaaagctaaattacatagacttaggcattaacatgtttgtggaagaatatagcagacgtatattgtatcatttgagtgaatgttcccaagtaggcattctaggctctatttaactgagtcacactgcataggaatttagaacctaacttttataggttatcaaaactgttgtcaccattgcacaattttgtcctaatatatacatagaaactttgtggggcatgttaagttacagtttgcacaagttcatctcatttgtattccattgattttttttttcttctaaacattttttcttcaaacagtatataactttttttaggggatttttttttagacagcaaaaactatctgaagatttccatttgtcaaaaagtaatgatttcttgataattgtgtagtaatgttttttagaacccagcagttaccttaaagctgaatttatatttagtaacttctgtgttaatactggatagcatgaattctgcattgagaaactgaatagctgtcataaaatgaaactttctttctaaagaaagatactcacatgagttcttgaagaatagtcataactagattaagatctgtgttttagtttaatagtttgaagtgcctgtttgggataatgataggtaatttagatgaatttaggggaaaaaaaagttatctgcagatatgttgagggcccatctctccccccacacccccacagagctaactgggttacagtgttttatccgaaagtttccaattccactgtcttgtgttttcatgttgaaaatacttttgcatttttcctttgagtgccaatttcttactagtactatttcttaatgtaacatgtttacctggaatgtattttaactatttttgtatagtgtaaactgaaacatgcacattttgtacattgtgctttcttttgtgggacatatgcagtgtgatccagttgttttccatcatttggttgcgctgacctaggaatgttggtcatatcaaacattaaaaatgaccactcttttaattgaaattaacttttaaatgtttataggagtatgtgctgtgaagtgatctaaaatttgtaatatttttgtcatgaactgtactactcctaattattgtaatgtaataaaaatagttacagtgactatgagtgtgtatttattcatgaaatttgaactgtttgccccgaaatggatatggaatactttataagccatagacactatagtataccagtgaatcttttatgcagcttgttagaagtatcctttatttctaaaaggtgctgtggatattatgtaaaggcgtgtttgcttaaacttaaaaccatatttagaagtagatgcaaaacaaatctgcctttatgacaaaaaaataggataacattatttatttatttccttttatcaaagaaggtaattgatacacaacaggtgacttggttttaggcccaaaggtagcagcagcaacattaataatggaaataattgaatagttagttatgtatgttaatgccagtcaccagcaggctatttcaaggtcagaagtaatgactccatacatattatttatttctataactacatttaaatcattaccagg

SEQ ID NO: 147 - DNA, 1045 bp, Homo sapiens
actatccggcgccgagccggaggggggaaacggcgcccgccgcccgcccggagcccgcgagcaaccccagtcccccccacccgcgcgtggcggcgccggctccctagccaccgcggccccaccctcttccggcctcagctgtccgggctgctttcgcctccgcctgtggatgctgcgcctctccgaacgcaacatgaaggtgctccttgccgccgccctcatcgcggggtccgtcttcttcctgctgctgccgggaccttctgcggccgatgagaagaagaaggggcccaaagtcaccgtcaaggtgtattttgacctacgaattggagatgaagatgtaggccgggtgatctttggtctcttcggaaagactgttccaaaaacagtggataattttgtggccttagctacaggagagaaaggatttggctacaaaaacagcaaattccatcgtgtaatcaaggacttcatgatccagggcggagacttcaccaggggagatggcacaggaggaaagagcatctacggtgagcgcttccccgatgagaacttcaaactgaagcactacgggcctggctgggtgagcatggccaacgcaggcaaagacaccaacggctcccagttcttcatcacgacagtcaagacagcctggctagatggcaagcatgtggtgtttggcaaagttctagagggcatggaggtggtgcggaaggtggagagcaccaagacagacagccgggataaacccctgaaggatgtgatcatcgcagactgcggcaagatcgaggtggagaagccctttgccatcgccaaggagtagggcacagggacatctttctttgagtgaccgtctgtgcaggccctgtagtccgccacagggctctgagctgcactggccccggtgctggcatctggtggagcggacccactcccctcacattccacaggcccatggactcacttttgtaacaaactcctaccaacactgaccaataaaaaaaaatgtgggtttttttttttttaatataaaaaaaaaaaaaaaaaa

SEQ ID NO: 148 - DNA, 2240 bp, Homo sapiens
acttccgctcggggcggcggcggtggcggaagtgggagcgggcctggagtcttggccataaagcctgaggcggcggcagcggcggagttggcggcttggagagctcgggagagttccctggaaccagaacttggaccttctcgcttctgtcctccgtttagtctcctcctcggcgggagccctcgcgacgcgcccggcccggagcccccagcgcagcggccgcgtttgaaggatgacctctaggaagaaagtgttgctgaaggttatcatcctgggagattctggagtcgggaagacatcactcatgaaccagtatgtgaataagaaattcagcaatcagtacaaagccacaataggagctgactttctgaccaaggaggtgatggtggatgacaggctagtcacaatgcagatatgggacacagcaggacaggaacggttccagtctctcggtgtggccttctacagaggtgcagactgctgcgttctggtatttgatgtgactgcccccaacacattcaaaaccctagatagctggagagatgagtttctcatccaggccagtccccgagatcctgaaaacttcccatttgttgtgttgggaaacaagattgacctcgaaaacagacaagtggccacaaagcgggcacaggcctggtgctacagcaaaaacaacattccctactttgagaccagtgccaaggaggccatcaacgtggagcaggcgttccagacgattgcacggaatgcacttaagcaggaaacggaggtggagctgtacaacgaatttcctgaacctatcaaactggacaagaatgaccgggccaaggcctcggcagaaagctgcagttgctgagggggcagtgagagttgagcacagagtccttcacaaaccaagaacacacgtaggccttcaacacaattcccctctcctcttccaaacaaaacatacattgatctctcacatccagctgccaaaagaaaaccccatcaaacacagttacaccccacatatctctcacacacacacacacacgcacacacacacacacagatctgacgtaatcaaactccagcccttgcccgtgatggctccttggggtctgcctgcccacccacatgagcccgcgagtatggcagcaggacaagccagcggtggaagtcattctgatatggagttggcattggaagcttattctttttgttcactggagagagagagaactgtttacagttaatctgtgtctaattatctgattttttttattggtcttgtggtctttttaccccccctttcccctccctccttgaaggctaccccttgggaaggctggtgccccatgccccattacaggctcacacccagtctgatcaggctgagttttgtatgtatctatctgttaatgcttgttacttttaactaatcagatctttttacagtatccatttattatgtaatgcttcttagaaaagaatcttatagtacatgttaatatatgcaaccaattaaaatgtataaattagtgtaagaaattcttggattatgtgtttaagtcctgtaatgcaggcctgtaaggtggagggttgaaccctgtttggattgcagagtgttactcagaattgggaaatccagctagcggcagtattctgtacagtagacacaagaattatgtacgccttttatcaaagacttaagagccaaaaagcttttcatctctccagggggaaaactgtctagttcccttctgtgtctaaattttccaaaacgttgatttgcataatacagtggtatgtgcaatggataaattgccgttatttcaaaaattaaaattctcattttctttcttttttttcccccctgctccacacttcaaaactcccgttagatcagcattctactacaagagtgaaaggaaaaccctaacagatctgtcctagtgattttacctttgttctagaaggcgctcctttcagggttgtggtattcttaggttagcggagctttttcctcttttccccacccatctccccaatattgcccattattaattaacctctttctttggttggaaccctggcagttctgctcccttcctaggatctgcccctgcattgtagcttgcttaacggagcacttctcctttttccaaaggtctacattctagggtgtgggctgagttcttctgtaaagagatgaacgcaatgccaataaaattgaacaagaacaatgataaaaaaaa

SEQ ID NO: 149 - DNA, 1386 bp, Homo sapiens
gtccggatgctgcgcctgcggtagagcggccgccatgttgcaaccgggaaggaaatgaatgggcagccgttaggaaagcctgccggtgactaaccctgcgctcctgcctcgatgggtggagtcgcgtgtggcggggaagtcaggtggagcgaggctagctggcccgatttctcctccgggtgatgcttttcctagattattctctgatttggtcgtattgggcgcctggtcaccagggctgcttttaactctggtaaagtggatattgttgccatcaatgaccccttcattgacctcaactacatggtttacatgttccaatatgattccacccatggcaaattccatggcaccgtcaaggctgagaacgggaagcttgtcatcaatggaaatcccatcaccatcttccaggagcgagatccctccaaaatcaagtggggcgatgctggcgctgagtacgtcgtggagtccactggcgtcttcaccaccatggagaaggctggggctcatttgcaggggggagccaaaagggtcatcatctctgccccctctgctgatgcccccatgttcgtcatgggtgtgaaccatgagaagtatgacaacagcctcaagatcatcagcaatgcctcctgcaccaccaactgcttagcacccctggccaaggtcatccatgacaactttggtatcgtggaaggactcatgaccacagtccatgccatcactgccacccagaagactgtggatggcccctccgggaaactgtggcgtgatggccgcggggctctccagaacatcatccctgcctctactggcgctgccaaggctgtgggcaaggtcatccctgagctgaacgggaagctcactggcatggccttccgtgtccccactgccaacgtgtcagtggtggacctgacctgccgtctagaaaaacctgccaaatatgatgacatcaagaaggtggtgaagcaggcgtcggagggccccctcaagggcatcctgggctacactgagcaccaggtggtctcctctgacttcaacagcgacacccactcctccacctttgacgctggggctggcattgccctcaacgaccactttgtcaagctcatttcctggtatgacaacgaatttggctacagcaacagggtggtggacctcatggcccacatggcctccaaggagtaagacccctggaccaccagccccagcaagagcacaagaggaagagagagaccctcactgctggggagtccctgccacactcagtcccccaccacactgaatctcccctcctcacagttgccatgtagaccccttgaagaggggaggggcctagggagccgcaccttgtcatgtaccatcaataaagtaccctgtgctcaacca

SEQ ID NO: 150 - protein, 988 aa, Artificial
  Synthetic dCasRx K942L
MSPKKKRKVEASIEKKKSFAKGMGVKSTLVSGSKVYMTTFAEGSDARLEKIVEGDSIRSVNEGEAFSAEMADKNAGYKIGNAKFSHPKGYAVVANNPLYTGPVQQDMLGLKETLEKRYFGESADGNDNICIQVIHNILDIEKILAEYITNAAYAVNNISGLDKDIIGFGKFSTVYTYDEFKDPEHHRAAFNNNDKLINAIKAQYDEFDNFLDNPRLGYFGQAFFSKEGRNYIINYGNECYDILALLSGLAHWVVANNEEESRISRTWLYNLDKNLDNEYISTLNYLYDRITNELTNSFSKNSAANVNYIAETLGINPAEFAEQYFRFSIMKEQKNLGFNITKLREVMLDRKDMSEIRKNHKVFDSIRTKVYTMMDFVIYRYYIEEDAKVAAANKSLPDNEKSLSEKDIFVINLRGSFNDDQKDALYYDEANRIWRKLENIMHNIKEFRGNKTREYKKKDAPRLPRILPAGRDVSAFSKLMYALTMFLDGKEINDLLTTLINKFDNIQSFLKVMPLIGVNAKFVEEYAFFKDSAKIADELRLIKSFARMGEPIADARRAMYIDAIRILGTNLSYDELKALADTFSLDENGNKLKKGKHGMRNFIINNVISNKRFHYLIRYGDPAHLHEIAKNEAVVKFVLGRIADIQKKQGQNGKNQIDRYYETCIGKDKGKSVSEKVDALTKIITGMNYDQFDKKRSVIEDTGRENAEREKFKKIISLYLTVIYHILKNIVNINARYVIGFHCVERDAQLYKEKGYDINLKKLEEKGFSSVTKLCAGIDETAPDKRKDVEKEMAERAKESIDSLESANPKLYANYIKYSDEKKAEEFTRQINREKAKTALNAYLRNTKWNVIIREDLLRIDNKTCTLFANKAVALEVARYVHAYINDIAEVNSYFQLYHYIMQRIIMNERYEKSSGKVSEYFDAVNDEKKYNDRLLKLLCVPFGYCIPRFLNLSIEALFDRNEAAKFDKEKKKVSGNSGSGPKKKRKV

SEQ ID NO: 151 - protein, 1405 aa, Artificial
  Synthetic NLS-dCasRx(1-406)-Xten-ADAR2dd(E488Q) -Xten-dCasRx(407-972)-NLS
MSPKKKRKVEASIEKKKSFAKGMGVKSTLVSGSKVYMTTFAEGSDARLEKIVEGDSIRSVNEGEAFSAEMADKNAGYKIGNAKFSHPKGYAVVANNPLYTGPVQQDMLGLKETLEKRYFGESADGNDNICIQVIHNILDIEKILAEYITNAAYAVNNISGLDKDIIGFGKFSTVYTYDEFKDPEHHRAAFNNNDKLINAIKAQYDEFDNFLDNPRLGYFGQAFFSKEGRNYIINYGNECYDILALLSGLAHWVVANNEEESRISRTWLYNLDKNLDNEYISTLNYLYDRITNELTNSFSKNSAANVNYIAETLGINPAEFAEQYFRFSIMKEQKNLGFNITKLREVMLDRKDMSEIRKNHKVFDSIRTKVYTMMDFVIYRYYIEEDAKVAAANKSLPDNEKSLSEKDIFVINLRGSFSGSETPGTSESATPESQLHLPQVLADAVSRLVLGKFGDLTDNFSSPHARRKVLAGVVMTTGTDVKDAKVISVSTGTKCINGEYMSDRGLALNDCHAEIISRRSLLRFLYTQLELYLNNKDDQKRSIFQKSERGGFRLKENVQFHLYISTSPCGDARIFSPHEPILEEPADRHPNRKARGQLRTKIESGQGTIPVRSNASIQTWDGVLQGERLLTMSCSDKIARWNVVGIQGSLLSIFVEPIYFSSIILGSLYHGDHLSRAMYQRISNIEDLPPLYTLNKPLLSGISNAEARQPGKAPNFSVNWTVGDSAIEVINATTGKDELGRASRLCKHALYCRWMRVHGKVPSHLLRSKITKPNVYHESKLAAKEYQAAKARLFTAFIKAGLGAWVEKPTEQDQFSLTSGSETPGTSESATPESNDDQKDALYYDEANRIWRKLENIMHNIKEFRGNKTREYKKKDAPRLPRILPAGRDVSAFSKLMYALTMFLDGKEINDLLTTLINKFDNIQSFLKVMPLIGVNAKFVEEYAFFKDSAKIADELRLIKSFARMGEPIADARRAMYIDAIRILGTNLSYDELKALADTFSLDENGNKLKKGKHGMRNFIINNVISNKRFHYLIRYGDPAHLHEIAKNEAVVKFVLGRIADIQKKQGQNGKNQIDRYYETCIGKDKGKSVSEKVDALTKIITGMNYDQFDKKRSVIEDTGRENAEREKFKKIISLYLTVIYHILKNIVNINARYVIGFHCVERDAQLYKEKGYDINLKKLEEKGFSSVTKLCAGIDETAPDKRKDVEKEMAERAKESIDSLESANPKLYANYIKYSDEKKAEEFTRQINREKAKTALNAYLRNTKWNVIIREDLLRIDNKTCTLFANKAVALEVARYVHAYINDIAEVNSYFQLYHYIMQRIIMNERYEKSSGKVSEYFDAVNDEKKYNDRLLKLLCVPFGYCIPRFKNLSIEALFDRNEAAKFDKEKKKVSGNSGSGPKKKRKV

SEQ ID NO: 152 - protein, 1405 aa, Artificial
  Synthetic NLS-dCasRx(1-689)-Xten-ADAR2dd (E488Q)-Xten-dCasRx(690-972)-NLS
MSPKKKRKVEASIEKKKSFAKGMGVKSTLVSGSKVYMTTFAEGSDARLEKIVEGDSIRSVNEGEAFSAEMADKNAGYKIGNAKFSHPKGYAVVANNPLYTGPVQQDMLGLKETLEKRYFGESADGNDNICIQVIHNILDIEKILAEYITNAAYAVNNISGLDKDIIGFGKFSTVYTYDEFKDPEHHRAAFNNNDKLINAIKAQYDEFDNFLDNPRLGYFGQAFFSKEGRNYIINYGNECYDILALLSGLAHWVVANNEEESRISRTWLYNLDKNLDNEYISTLNYLYDRITNELTNSFSKNSAANVNYIAETLGINPAEFAEQYFRFSIMKEQKNLGFNITKLREVMLDRKDMSEIRKNHKVFDSIRTKVYTMMDFVIYRYYIEEDAKVAAANKSLPDNEKSLSEKDIFVINLRGSFNDDQKDALYYDEANRIWRKLENIMHNIKEFRGNKTREYKKKDAPRLPRILPAGRDVSAFSKLMYALTMFLDGKEINDLLTTLINKFDNIQSFLKVMPLIGVNAKFVEEYAFFKDSAKIADELRLIKSFARMGEPIADARRAMYIDAIRILGTNLSYDELKALADTFSLDENGNKLKKGKHGMRNFIINNVISNKRFHYLIRYGDPAHLHEIAKNEAVVKFVLGRIADIQKKQGQNGKNQIDRYYETCIGKDKGKSVSEKVDALTKIITGMNYDQFDKKRSVIESGSETPGTSESATPESQLHLPQVLADAVSRLVLGKFGDLTDNFSSPHARRKVLAGVVMTTGTDVKDAKVISVSTGTKCINGEYMSDRGLALNDCHAEIISRRSLLRFLYTQLELYLNNKDDQKRSIFQKSERGGFRLKENVQFHLYISTSPCGDARIFSPHEPILEEPADRHPNRKARGQLRTKIESGQGTIPVRSNASIQTWDGVLQGERLLTMSCSDKIARWNVVGIQGSLLSIFVEPIYFSSIILGSLYHGDHLSRAMYQRISNIEDLPPLYTLNKPLLSGISNAEARQPGKAPNFSVNWTVGDSAIEVINATTGKDELGRASRLCKHALYCRWMRVHGKVPSHLLRSKITKPNVYHESKLAAKEYQAAKARLFTAFIKAGLGAWVEKPTEQDQFSLTSGSETPGTSESATPESDTGRENAEREKFKKIISLYLTVIYHILKNIVNINARYVIGFHCVERDAQLYKEKGYDINLKKLEEKGFSSVTKLCAGIDETAPDKRKDVEKEMAERAKESIDSLESANPKLYANYIKYSDEKKAEEFTRQINREKAKTALNAYLRNTKWNVIIREDLLRIDNKTCTLFANKAVALEVARYVHAYINDIAEVNSYFQLYHYIMQRIIMNERYEKSSGKVSEYFDAVNDEKKYNDRLLKLLCVPFGYCIPRFKNLSIEALFDRNEAAKFDKEKKKVSGNSGSGPKKKRKV

SEQ ID NO: 153 - protein, 1405 aa, Artificial
  Synthetic NLS-dCasRx(1-655)-Xten-ADAR2dd (E488Q)-Xten-dCasRx(656-972)-NLS
MSPKKKRKVEASIEKKKSFAKGMGVKSTLVSGSKVYMTTFAEGSDARLEKIVEGDSIRSVNEGEAFSAEMADKNAGYKIGNAKFSHPKGYAVVANNPLYTGPVQQDMLGLKETLEKRYFGESADGNDNICIQVIHNILDIEKILAEYITNAAYAVNNISGLDKDIIGFGKFSTVYTYDEFKDPEHHRAAFNNNDKLINAIKAQYDEFDNFLDNPRLGYFGQAFFSKEGRNYIINYGNECYDILALLSGLAHWVVANNEEESRISRTWLYNLDKNLDNEYISTLNYLYDRITNELTNSFSKNSAANVNYIAETLGINPAEFAEQYFRFSIMKEQKNLGFNITKLREVMLDRKDMSEIRKNHKVFDSIRTKVYTMMDFVIYRYYIEEDAKVAAANKSLPDNEKSLSEKDIFVINLRGSFNDDQKDALYYDEANRIWRKLENIMHNIKEFRGNKTREYKKKDAPRLPRILPAGRDVSAFSKLMYALTMFLDGKEINDLLTTLINKFDNIQSFLKVMPLIGVNAKFVEEYAFFKDSAKIADELRLIKSFARMGEPIADARRAMYIDAIRILGTNLSYDELKALADTFSLDENGNKLKKGKHGMRNFIINNVISNKRFHYLIRYGDPAHLHEIAKNEAVVKFVLGRIADIQKKQGQNGKNQIDRYYETCIGSGSETPGTSESATPESQLHLPQVLADAVSRLVLGKFGDLTDNFSSPHARRKVLAGVVMTTGTDVKDAKVISVSTGTKCINGEYMSDRGLALNDCHAEIISRRSLLRFLYTQLELYLNNKDDQKRSIFQKSERGGFRLKENVQFHLYISTSPCGDARIFSPHEPILEEPADRHPNRKARGQLRTKIESGQGTIPVRSNASIQTWDGVLQGERLLTMSCSDKIARWNVVGIQGSLLSIFVEPIYFSSIILGSLYHGDHLSRAMYQRISNIEDLPPLYTLNKPLLSGISNAEARQPGKAPNFSVNWTVGDSAIEVINATTGKDELGRASRLCKHALYCRWMRVHGKVPSHLLRSKITKPNVYHESKLAAKEYQAAKARLFTAFIKAGLGAWVEKPTEQDQFSLTSGSETPGTSESATPESKDKGKSVSEKVDALTKIITGMNYDQFDKKRSVIEDTGRENAEREKFKKIISLYLTVIYHILKNIVNINARYVIGFHCVERDAQLYKEKGYDINLKKLEEKGFSSVTKLCAGIDETAPDKRKDVEKEMAERAKESIDSLESANPKLYANYIKYSDEKKAEEFTRQINREKAKTALNAYLRNTKWNVIIREDLLRIDNKTCTLFANKAVALEVARYVHAYINDIAEVNSYFQLYHYIMQRIIMNERYEKSSGKVSEYFDAVNDEKKYNDRLLKLLCVPFGYCIPRFKNLSIEALFDRNEAAKFDKEKKKVSGNSGSGPKKKRKV

SEQ ID NO: 154 - protein, 1405 aa, Artificial
  Synthetic NLS-dCasRx(1-338)-Xten-ADAR2dd (E488Q)-Xten-dCasRx(339-972)-NLS
MSPKKKRKVEASIEKKKSFAKGMGVKSTLVSGSKVYMTTFAEGSDARLEKIVEGDSIRSVNEGEAFSAEMADKNAGYKIGNAKFSHPKGYAVVANNPLYTGPVQQDMLGLKETLEKRYFGESADGNDNICIQVIHNILDIEKILAEYITNAAYAVNNISGLDKDIIGFGKFSTVYTYDEFKDPEHHRAAFNNNDKLINAIKAQYDEFDNFLDNPRLGYFGQAFFSKEGRNYIINYGNECYDILALLSGLAHWVVANNEEESRISRTWLYNLDKNLDNEYISTLNYLYDRITNELTNSFSKNSAANVNYIAETLGINPAEFAEQYFRFSIMKEQKNLGFNITKLREVMLDSGSETPGTSESATPESQLHLPQVLADAVSRLVLGKFGDLTDNFSSPHARRKVLAGVVMTTGTDVKDAKVISVSTGTKCINGEYMSDRGLALNDCHAEIISRRSLLRFLYTQLELYLNNKDDQKRSIFQKSERGGFRLKENVQFHLYISTSPCGDARIFSPHEPILEEPADRHPNRKARGQLRTKIESGQGTIPVRSNASIQTWDGVLQGERLLTMSCSDKIARWNVVGIQGSLLSIFVEPIYFSSIILGSLYHGDHLSRAMYQRISNIEDLPPLYTLNKPLLSGISNAEARQPGKAPNFSVNWTVGDSAIEVINATTGKDELGRASRLCKHALYCRWMRVHGKVPSHLLRSKITKPNVYHESKLAAKEYQAAKARLFTAFIKAGLGAWVEKPTEQDQFSLTSGSETPGTSESATPESRKDMSEIRKNHKVFDSIRTKVYTMMDFVIYRYYIEEDAKVAAANKSLPDNEKSLSEKDIFVINLRGSFNDDQKDALYYDEANRIWRKLENIMHNIKEFRGNKTREYKKKDAPRLPRILPAGRDVSAFSKLMYALTMFLDGKEINDLLTTLINKFDNIQSFLKVMPLIGVNAKFVEEYAFFKDSAKIADELRLIKSFARMGEPIADARRAMYIDAIRILGTNLSYDELKALADTFSLDENGNKLKKGKHGMRNFIINNVISNKRFHYLIRYGDPAHLHEIAKNEAVVKFVLGRIADIQKKQGQNGKNQIDRYYETCIGKDKGKSVSEKVDALTKIITGMNYDQFDKKRSVIEDTGRENAEREKFKKIISLYLTVIYHILKNIVNINARYVIGFHCVERDAQLYKEKGYDINLKKLEEKGFSSVTKLCAGIDETAPDKRKDVEKEMAERAKESIDSLESANPKLYANYIKYSDEKKAEEFTRQINREKAKTALNAYLRNTKWNVIIREDLLRIDNKTCTLFANKAVALEVARYVHAYINDIAEVNSYFQLYHYIMQRIIMNERYEKSSGKVSEYFDAVNDEKKYNDRLLKLLCVPFGYCIPRFKNLSIEALFDRNEAAKFDKEKKKVSGNSGSGPKKKRKV

SEQ ID NO: 155 - protein, 1405 aa, Artificial
  Synthetic NLS-dCasRx(1-376)-Xten-ADAR2dd (E488Q)-Xten-dCasRx(377-972)-NLS
MSPKKKRKVEASIEKKKSFAKGMGVKSTLVSGSKVYMTTFAEGSDARLEKIVEGDSIRSVNEGEAFSAEMADKNAGYKIGNAKFSHPKGYAVVANNPLYTGPVQQDMLGLKETLEKRYFGESADGNDNICIQVIHNILDIEKILAEYITNAAYAVNNISGLDKDIIGFGKFSTVYTYDEFKDPEHHRAAFNNNDKLINAIKAQYDEFDNFLDNPRLGYFGQAFFSKEGRNYIINYGNECYDILALLSGLAHWVVANNEEESRISRTWLYNLDKNLDNEYISTLNYLYDRITNELTNSFSKNSAANVNYIAETLGINPAEFAEQYFRFSIMKEQKNLGFNITKLREVMLDRKDMSEIRKNHKSGSETPGTSESATPESQLHLPQVLADAVSRLVLGKFGDLTDNFSSPHARRKVLAGVVMTTGTDVKDAKVISVSTGTKCINGEYMSDRGLALNDCHAEIISRRSLLRFLYTQLELYLNNKDDQKRSIFQKSERGGFRLKENVQFHLYISTSPCGDARIFSPHEPILEEPADRHPNRKARGQLRTKIESGQGTIPVRSNASIQTWDGVLQGERLLTMSCSDKIARWNVVGIQGSLLSIFVEPIYFSSIILGSLYHGDHLSRAMYQRISNIEDLPPLYTLNKPLLSGISNAEARQPGKAPNFSVNWTVGDSAIEVINATTGKDELGRASRLCKHALYCRWMRVHGKVPSHLLRSKITKPNVYHESKLAAKEYQAAKARLFTAFIKAGLGAWVEKPTEQDQFSLTSGSETPGTSESATPESVFDSIRTKVYTMMDFVIYRYYIEEDAKVAAANKSLPDNEKSLSEKDIFVINLRGSFNDDQKDALYYDEANRIWRKLENIMHNIKEFRGNKTREYKKKDAPRLPRILPAGRDVSAFSKLMYALTMFLDGKEINDLLTTLINKFDNIQSFLKVMPLIGVNAKFVEEYAFFKDSAKIADELRLIKSFARMGEPIADARRAMYIDAIRILGTNLSYDELKALADTFSLDENGNKLKKGKHGMRNFIINNVISNKRFHYLIRYGDPAHLHEIAKNEAVVKFVLGRIADIQKKQGQNGKNQIDRYYETCIGKDKGKSVSEKVDALTKIITGMNYDQFDKKRSVIEDTGRENAEREKFKKIISLYLTVIYHILKNIVNINARYVIGFHCVERDAQLYKEKGYDINLKKLEEKGFSSVTKLCAGIDETAPDKRKDVEKEMAERAKESIDSLESANPKLYANYIKYSDEKKAEEFTRQINREKAKTALNAYLRNTKWNVIIREDLLRIDNKTCTLFANKAVALEVARYVHAYINDIAEVNSYFQLYHYIMQRIIMNERYEKSSGKVSEYFDAVNDEKKYNDRLLKLLCVPFGYCIPRFKNLSIEALFDRNEAAKFDKEKKKVSGNSGSGPKKKRKV

SEQ ID NO: 156 - protein, 1405 aa, Artificial
  Synthetic NLS-dCasRx(1-878)-Xten-ADAR2dd (E488Q)-Xten-dCasRx(879-972)-NLS
MSPKKKRKVEASIEKKKSFAKGMGVKSTLVSGSKVYMTTFAEGSDARLEKIVEGDSIRSVNEGEAFSAEMADKNAGYKIGNAKFSHPKGYAVVANNPLYTGPVQQDMLGLKETLEKRYFGESADGNDNICIQVIHNILDIEKILAEYITNAAYAVNNISGLDKDIIGFGKFSTVYTYDEFKDPEHHRAAFNNNDKLINAIKAQYDEFDNFLDNPRLGYFGQAFFSKEGRNYIINYGNECYDILALLSGLAHWVVANNEEESRISRTWLYNLDKNLDNEYISTLNYLYDRITNELTNSFSKNSAANVNYIAETLGINPAEFAEQYFRFSIMKEQKNLGFNITKLREVMLDRKDMSEIRKNHKVFDSIRTKVYTMMDFVIYRYYIEEDAKVAAANKSLPDNEKSLSEKDIFVINLRGSFNDDQKDALYYDEANRIWRKLENIMHNIKEFRGNKTREYKKKDAPRLPRILPAGRDVSAFSKLMYALTMFLDGKEINDLLTTLINKFDNIQSFLKVMPLIGVNAKFVEEYAFFKDSAKIADELRLIKSFARMGEPIADARRAMYIDAIRILGTNLSYDELKALADTFSLDENGNKLKKGKHGMRNFIINNVISNKRFHYLIRYGDPAHLHEIAKNEAVVKFVLGRIADIQKKQGQNGKNQIDRYYETCIGKDKGKSVSEKVDALTKIITGMNYDQFDKKRSVIEDTGRENAEREKFKKIISLYLTVIYHILKNIVNINARYVIGFHCVERDAQLYKEKGYDINLKKLEEKGFSSVTKLCAGIDETAPDKRKDVEKEMAERAKESIDSLESANPKLYANYIKYSDEKKAEEFTRQINREKAKTALNAYLRNTKWNVIIREDLLRIDNKTCTLFANKAVALEVARYVHAYINDIASGSETPGTSESATPESQLHLPQVLADAVSRLVLGKFGDLTDNFSSPHARRKVLAGVVMTTGTDVKDAKVISVSTGTKCINGEYMSDRGLALNDCHAEIISRRSLLRFLYTQLELYLNNKDDQKRSIFQKSERGGFRLKENVQFHLYISTSPCGDARIFSPHEPILEEPADRHPNRKARGQLRTKIESGQGTIPVRSNASIQTWDGVLQGERLLTMSCSDKIARWNVVGIQGSLLSIFVEPIYFSSIILGSLYHGDHLSRAMYQRISNIEDLPPLYTLNKPLLSGISNAEARQPGKAPNFSVNWTVGDSAIEVINATTGKDELGRASRLCKHALYCRWMRVHGKVPSHLLRSKITKPNVYHESKLAAKEYQAAKARLFTAFIKAGLGAWVEKPTEQDQFSLTSGSETPGTSESATPESEVNSYFQLYHYIMQRIIMNERYEKSSGKVSEYFDAVNDEKKYNDRLLKLLCVPFGYCIPRFKNLSIEALFDRNEAAKFDKEKKKVSGNSGSGPKKKRKV

SEQ ID NO: 157 - protein, 1405 aa, Artificial
  Synthetic NLS-dCasRx(1-558)-Xten-ADAR2dd (E488Q)-Xten-dCasRx(559-972)-NLS
MSPKKKRKVEASIEKKKSFAKGMGVKSTLVSGSKVYMTTFAEGSDARLEKIVEGDSIRSVNEGEAFSAEMADKNAGYKIGNAKFSHPKGYAVVANNPLYTGPVQQDMLGLKETLEKRYFGESADGNDNICIQVIHNILDIEKILAEYITNAAYAVNNISGLDKDIIGFGKFSTVYTYDEFKDPEHHRAAFNNNDKLINAIKAQYDEFDNFLDNPRLGYFGQAFFSKEGRNYIINYGNECYDILALLSGLAHWVVANNEEESRISRTWLYNLDKNLDNEYISTLNYLYDRITNELTNSFSKNSAANVNYIAETLGINPAEFAEQYFRFSIMKEQKNLGFNITKLREVMLDRKDMSEIRKNHKVFDSIRTKVYTMMDFVIYRYYIEEDAKVAAANKSLPDNEKSLSEKDIFVINLRGSFNDDQKDALYYDEANRIWRKLENIMHNIKEFRGNKTREYKKKDAPRLPRILPAGRDVSAFSKLMYALTMFLDGKEINDLLTTLINKFDNIQSFLKVMPLIGVNAKFVEEYAFFKDSAKIADELRLIKSFARMGEPIADARRAMYIDAIRILSGSETPGTSESATPESQLHLPQVLADAVSRLVLGKFGDLTDNFSSPHARRKVLAGVVMTTGTDVKDAKVISVSTGTKCINGEYMSDRGLALNDCHAEIISRRSLLRFLYTQLELYLNNKDDQKRSIFQKSERGGFRLKENVQFHLYISTSPCGDARIFSPHEPILEEPADRHPNRKARGQLRTKIESGQGTIPVRSNASIQTWDGVLQGERLLTMSCSDKIARWNVVGIQGSLLSIFVEPIYFSSIILGSLYHGDHLSRAMYQRISNIEDLPPLYTLNKPLLSGISNAEARQPGKAPNFSVNWTVGDSAIEVINATTGKDELGRASRLCKHALYCRWMRVHGKVPSHLLRSKITKPNVYHESKLAAKEYQAAKARLFTAFIKAGLGAWVEKPTEQDQFSLTSGSETPGTSESATPESGTNLSYDELKALADTFSLDENGNKLKKGKHGMRNFIINNVISNKRFHYLIRYGDPAHLHEIAKNEAVVKFVLGRIADIQKKQGQNGKNQIDRYYETCIGKDKGKSVSEKVDALTKIITGMNYDQFDKKRSVIEDTGRENAEREKFKKIISLYLTVIYHILKNIVNINARYVIGFHCVERDAQLYKEKGYDINLKKLEEKGFSSVTKLCAGIDETAPDKRKDVEKEMAERAKESIDSLESANPKLYANYIKYSDEKKAEEFTRQINREKAKTALNAYLRNTKWNVIIREDLLRIDNKTCTLFANKAVALEVARYVHAYINDIAEVNSYFQLYHYIMQRIIMNERYEKSSGKVSEYFDAVNDEKKYNDRLLKLLCVPFGYCIPRFKNLSIEALFDRNEAAKFDKEKKKVSGNSGSGPKKKRKV

SEQ ID NO: 158 - protein, 1421 aa, Artificial
  Synthetic dCasRx(339-972)-NLS-GS-Xten-GS-NLS- dCasRx(1-338)-Xten-ADAR2dd(E488Q)
MRKDMSEIRKNHKVFDSIRTKVYTMMDFVIYRYYIEEDAKVAAANKSLPDNEKSLSEKDIFVINLRGSFNDDQKDALYYDEANRIWRKLENIMHNIKEFRGNKTREYKKKDAPRLPRILPAGRDVSAFSKLMYALTMFLDGKEINDLLTTLINKFDNIQSFLKVMPLIGVNAKFVEEYAFFKDSAKIADELRLIKSFARMGEPIADARRAMYIDAIRILGTNLSYDELKALADTFSLDENGNKLKKGKHGMRNFIINNVISNKRFHYLIRYGDPAHLHEIAKNEAVVKFVLGRIADIQKKQGQNGKNQIDRYYETCIGKDKGKSVSEKVDALTKIITGMNYDQFDKKRSVIEDTGRENAEREKFKKIISLYLTVIYHILKNIVNINARYVIGFHCVERDAQLYKEKGYDINLKKLEEKGFSSVTKLCAGIDETAPDKRKDVEKEMAERAKESIDSLESANPKLYANYIKYSDEKKAEEFTRQINREKAKTALNAYLRNTKWNVIIREDLLRIDNKTCTLFANKAVALEVARYVHAYINDIAEVNSYFQLYHYIMQRIIMNERYEKSSGKVSEYFDAVNDEKKYNDRLLKLLCVPFGYCIPRFKNLSIEALFDRNEAAKFDKEKKKVSGNSGSGPKKKRKVSGGSSGGSSGSETPGTSESATPESSGGSSGGSSPKKKRKVEASIEKKKSFAKGMGVKSTLVSGSKVYMTTFAEGSDARLEKIVEGDSIRSVNEGEAFSAEMADKNAGYKIGNAKFSHPKGYAVVANNPLYTGPVQQDMLGLKETLEKRYFGESADGNDNICIQVIHNILDIEKILAEYITNAAYAVNNISGLDKDIIGFGKFSTVYTYDEFKDPEHHRAAFNNNDKLINAIKAQYDEFDNFLDNPRLGYFGQAFFSKEGRNYIINYGNECYDILALLSGLAHWVVANNEEESRISRTWLYNLDKNLDNEYISTLNYLYDRITNELTNSFSKNSAANVNYIAETLGINPAEFAEQYFRFSIMKEQKNLGFNITKLREVMLDSGSETPGTSESATPESQLHLPQVLADAVSRLVLGKFGDLTDNFSSPHARRKVLAGVVMTTGTDVKDAKVISVSTGTKCINGEYMSDRGLALNDCHAEIISRRSLLRFLYTQLELYLNNKDDQKRSIFQKSERGGFRLKENVQFHLYISTSPCGDARIFSPHEPILEEPADRHPNRKARGQLRTKIESGQGTIPVRSNASIQTWDGVLQGERLLTMSCSDKIARWNVVGIQGSLLSIFVEPIYFSSIILGSLYHGDHLSRAMYQRISNIEDLPPLYTLNKPLLSGISNAEARQPGKAPNFSVNWTVGDSAIEVINATTGKDELGRASRLCKHALYCRWMRVHGKVPSHLLRSKITKPNVYHESKLAAKEYQAAKARLFTAFIKAGLGAWVEKPTEQDQFSLT

SEQ ID NO: 159 - protein, 1421 aa, Artificial
  Synthetic dCasRx(339-972)-NLS-GS-Xten-GS-NLS- dCasRx(1-338)-Xten-ADAR2dd(E488Q/H460D)
MRKDMSEIRKNHKVFDSIRTKVYTMMDFVIYRYYIEEDAKVAAANKSLPDNEKSLSEKDIFVINLRGSFNDDQKDALYYDEANRIWRKLENIMHNIKEFRGNKTREYKKKDAPRLPRILPAGRDVSAFSKLMYALTMFLDGKEINDLLTTLINKFDNIQSFLKVMPLIGVNAKFVEEYAFFKDSAKIADELRLIKSFARMGEPIADARRAMYIDAIRILGTNLSYDELKALADTFSLDENGNKLKKGKHGMRNFIINNVISNKRFHYLIRYGDPAHLHEIAKNEAVVKFVLGRIADIQKKQGQNGKNQIDRYYETCIGKDKGKSVSEKVDALTKIITGMNYDQFDKKRSVIEDTGRENAEREKFKKIISLYLTVIYHILKNIVNINARYVIGFHCVERDAQLYKEKGYDINLKKLEEKGFSSVTKLCAGIDETAPDKRKDVEKEMAERAKESIDSLESANPKLYANYIKYSDEKKAEEFTRQINREKAKTALNAYLRNTKWNVIIREDLLRIDNKTCTLFANKAVALEVARYVHAYINDIAEVNSYFQLYHYIMQRIIMNERYEKSSGKVSEYFDAVNDEKKYNDRLLKLLCVPFGYCIPRFKNLSIEALFDRNEAAKFDKEKKKVSGNSGSGPKKKRKVSGGSSGGSSGSETPGTSESATPESSGGSSGGSSPKKKRKVEASIEKKKSFAKGMGVKSTLVSGSKVYMTTFAEGSDARLEKIVEGDSIRSVNEGEAFSAEMADKNAGYKIGNAKFSHPKGYAVVANNPLYTGPVQQDMLGLKETLEKRYFGESADGNDNICIQVIHNILDIEKILAEYITNAAYAVNNISGLDKDIIGFGKFSTVYTYDEFKDPEHHRAAFNNNDKLINAIKAQYDEFDNFLDNPRLGYFGQAFFSKEGRNYIINYGNECYDILALLSGLAHWVVANNEEESRISRTWLYNLDKNLDNEYISTLNYLYDRITNELTNSFSKNSAANVNYIAETLGINPAEFAEQYFRFSIMKEQKNLGFNITKLREVMLDSGSETPGTSESATPESQLHLPQVLADAVSRLVLGKFGDLTDNFSSPHARRKVLAGVVMTTGTDVKDAKVISVSTGTKCINGEYMSDRGLALNDCHAEIISRRSLLRFLYTQLELYLNNKDDQKRSIFQKSERGGFRLKENVQFHLYISTSPCGDARIFSPDEPILEEPADRHPNRKARGQLRTKIESGQGTIPVRSNASIQTWDGVLQGERLLTMSCSDKIARWNVVGIQGSLLSIFVEPIYFSSIILGSLYHGDHLSRAMYQRISNIEDLPPLYTLNKPLLSGISNAEARQPGKAPNFSVNWTVGDSAIEVINATTGKDELGRASRLCKHALYCRWMRVHGKVPSHLLRSKITKPNVYHESKLAAKEYQAAKARLFTAFIKAGLGAWVEKPTEQDQFSLT

SEQ ID NO: 160 - protein, 1421 aa, Artificial
  Synthetic dCasRx(339-972)(K492L)-NLS-GS-Xten- GS-NLS-dCasRx(1-338)-Xten-ADAR 2dd(E488Q)
MRKDMSEIRKNHKVFDSIRTKVYTMMDFVIYRYYIEEDAKVAAANKSLPDNEKSLSEKDIFVINLRGSFNDDQKDALYYDEANRIWRKLENIMHNIKEFRGNKTREYKKKDAPRLPRILPAGRDVSAFSKLMYALTMFLDGKEINDLLTTLINKFDNIQSFLKVMPLIGVNAKFVEEYAFFKDSAKIADELRLIKSFARMGEPIADARRAMYIDAIRILGTNLSYDELKALADTFSLDENGNKLKKGKHGMRNFIINNVISNKRFHYLIRYGDPAHLHEIAKNEAVVKFVLGRIADIQKKQGQNGKNQIDRYYETCIGKDKGKSVSEKVDALTKIITGMNYDQFDKKRSVIEDTGRENAEREKFKKIISLYLTVIYHILKNIVNINARYVIGFHCVERDAQLYKEKGYDINLKKLEEKGFSSVTKLCAGIDETAPDKRKDVEKEMAERAKESIDSLESANPKLYANYIKYSDEKKAEEFTRQINREKAKTALNAYLRNTKWNVIIREDLLRIDNKTCTLFANKAVALEVARYVHAYINDIAEVNSYFQLYHYIMQRIIMNERYEKSSGKVSEYFDAVNDEKKYNDRLLKLLCVPFGYCIPRFLNLSIEALFDRNEAAKFDKEKKKVSGNSGSGPKKKRKVSGGSSGGSSGSETPGTSESATPESSGGSSGGSSPKKKRKVEASIEKKKSFAKGMGVKSTLVSGSKVYMTTFAEGSDARLEKIVEGDSIRSVNEGEAFSAEMADKNAGYKIGNAKFSHPKGYAVVANNPLYTGPVQQDMLGLKETLEKRYFGESADGNDNICIQVIHNILDIEKILAEYITNAAYAVNNISGLDKDIIGFGKFSTVYTYDEFKDPEHHRAAFNNNDKLINAIKAQYDEFDNFLDNPRLGYFGQAFFSKEGRNYIINYGNECYDILALLSGLAHWVVANNEEESRISRTWLYNLDKNLDNEYISTLNYLYDRITNELTNSFSKNSAANVNYIAETLGINPAEFAEQYFRFSIMKEQKNLGFNITKLREVMLDSGSETPGTSESATPESQLHLPQVLADAVSRLVLGKFGDLTDNFSSPHARRKVLAGVVMTTGTDVKDAKVISVSTGTKCINGEYMSDRGLALNDCHAEIISRRSLLRFLYTQLELYLNNKDDQKRSIFQKSERGGFRLKENVQFHLYISTSPCGDARIFSPHEPILEEPADRHPNRKARGQLRTKIESGQGTIPVRSNASIQTWDGVLQGERLLTMSCSDKIARWNVVGIQGSLLSIFVEPIYFSSIILGSLYHGDHLSRAMYQRISNIEDLPPLYTLNKPLLSGISNAEARQPGKAPNFSVNWTVGDSAIEVINATTGKDELGRASRLCKHALYCRWMRVHGKVPSHLLRSKITKPNVYHESKLAAKEYQAAKARLFTAFIKAGLGAWVEKPTEQDQFSLT

SEQ ID NO: 161 - protein, 1421 aa, Artificial
  Synthetic dCasRx(339-972)(K492L)-NLS-GS-Xten- GS-NLS-dCasRx(1-338)-Xten-ADAR 2dd(E488Q/H460D)
MRKDMSEIRKNHKVFDSIRTKVYTMMDFVIYRYYIEEDAKVAAANKSLPDNEKSLSEKDIFVINLRGSFNDDQKDALYYDEANRIWRKLENIMHNIKEFRGNKTREYKKKDAPRLPRILPAGRDVSAFSKLMYALTMFLDGKEINDLLTTLINKFDNIQSFLKVMPLIGVNAKFVEEYAFFKDSAKIADELRLIKSFARMGEPIADARRAMYIDAIRILGTNLSYDELKALADTFSLDENGNKLKKGKHGMRNFIINNVISNKRFHYLIRYGDPAHLHEIAKNEAVVKFVLGRIADIQKKQGQNGKNQIDRYYETCIGKDKGKSVSEKVDALTKIITGMNYDQFDKKRSVIEDTGRENAEREKFKKIISLYLTVIYHILKNIVNINARYVIGFHCVERDAQLYKEKGYDINLKKLEEKGFSSVTKLCAGIDETAPDKRKDVEKEMAERAKESIDSLESANPKLYANYIKYSDEKKAEEFTRQINREKAKTALNAYLRNTKWNVIIREDLLRIDNKTCTLFANKAVALEVARYVHAYINDIAEVNSYFQLYHYIMQRIIMNERYEKSSGKVSEYFDAVNDEKKYNDRLLKLLCVPFGYCIPRFLNLSIEALFDRNEAAKFDKEKKKVSGNSGSGPKKKRKVSGGSSGGSSGSETPGTSESATPESSGGSSGGSSPKKKRKVEASIEKKKSFAKGMGVKSTLVSGSKVYMTTFAEGSDARLEKIVEGDSIRSVNEGEAFSAEMADKNAGYKIGNAKFSHPKGYAVVANNPLYTGPVQQDMLGLKETLEKRYFGESADGNDNICIQVIHNILDIEKILAEYITNAAYAVNNISGLDKDIIGFGKFSTVYTYDEFKDPEHHRAAFNNNDKLINAIKAQYDEFDNFLDNPRLGYFGQAFFSKEGRNYIINYGNECYDILALLSGLAHWVVANNEEESRISRTWLYNLDKNLDNEYISTLNYLYDRITNELTNSFSKNSAANVNYIAETLGINPAEFAEQYFRFSIMKEQKNLGFNITKLREVMLDSGSETPGTSESATPESQLHLPQVLADAVSRLVLGKFGDLTDNFSSPHARRKVLAGVVMTTGTDVKDAKVISVSTGTKCINGEYMSDRGLALNDCHAEIISRRSLLRFLYTQLELYLNNKDDQKRSIFQKSERGGFRLKENVQFHLYISTSPCGDARIFSPDEPILEEPADRHPNRKARGQLRTKIESGQGTIPVRSNASIQTWDGVLQGERLLTMSCSDKIARWNVVGIQGSLLSIFVEPIYFSSIILGSLYHGDHLSRAMYQRISNIEDLPPLYTLNKPLLSGISNAEARQPGKAPNFSVNWTVGDSAIEVINATTGKDELGRASRLCKHALYCRWMRVHGKVPSHLLRSKITKPNVYHESKLAAKEYQAAKARLFTAFIKAGLGAWVEKPTEQDQFSLT

SEQ ID NO: 162 - protein, 1421 aa, Artificial
  Synthetic ADAR2dd(E488Q) -Xten- dCasRx(339-972)-NLS-GS-Xten-GS-NLS-dCasRx(1-338)
MQLHLPQVLADAVSRLVLGKFGDLTDNFSSPHARRKVLAGVVMTTGTDVKDAKVISVSTGTKCINGEYMSDRGLALNDCHAEIISRRSLLRFLYTQLELYLNNKDDQKRSIFQKSERGGFRLKENVQFHLYISTSPCGDARIFSPHEPILEEPADRHPNRKARGQLRTKIESGQGTIPVRSNASIQTWDGVLQGERLLTMSCSDKIARWNVVGIQGSLLSIFVEPIYFSSIILGSLYHGDHLSRAMYQRISNIEDLPPLYTLNKPLLSGISNAEARQPGKAPNFSVNWTVGDSAIEVINATTGKDELGRASRLCKHALYCRWMRVHGKVPSHLLRSKITKPNVYHESKLAAKEYQAAKARLFTAFIKAGLGAWVEKPTEQDQFSLTSGSETPGTSESATPESRKDMSEIRKNHKVFDSIRTKVYTMMDFVIYRYYIEEDAKVAAANKSLPDNEKSLSEKDIFVINLRGSFNDDQKDALYYDEANRIWRKLENIMHNIKEFRGNKTREYKKKDAPRLPRILPAGRDVSAFSKLMYALTMFLDGKEINDLLTTLINKFDNIQSFLKVMPLIGVNAKFVEEYAFFKDSAKIADELRLIKSFARMGEPIADARRAMYIDAIRILGTNLSYDELKALADTFSLDENGNKLKKGKHGMRNFIINNVISNKRFHYLIRYGDPAHLHEIAKNEAVVKFVLGRIADIQKKQGQNGKNQIDRYYETCIGKDKGKSVSEKVDALTKIITGMNYDQFDKKRSVIEDTGRENAEREKFKKIISLYLTVIYHILKNIVNINARYVIGFHCVERDAQLYKEKGYDINLKKLEEKGFSSVTKLCAGIDETAPDKRKDVEKEMAERAKESIDSLESANPKLYANYIKYSDEKKAEEFTRQINREKAKTALNAYLRNTKWNVIIREDLLRIDNKTCTLFANKAVALEVARYVHAYINDIAEVNSYFQLYHYIMQRIIMNERYEKSSGKVSEYFDAVNDEKKYNDRLLKLLCVPFGYCIPRFKNLSIEALFDRNEAAKFDKEKKKVSGNSGSGPKKKRKVSGGSSGGSSGSETPGTSESATPESSGGSSGGSSPKKKRKVEASIEKKKSFAKGMGVKSTLVSGSKVYMTTFAEGSDARLEKIVEGDSIRSVNEGEAFSAEMADKNAGYKIGNAKFSHPKGYAVVANNPLYTGPVQQDMLGLKETLEKRYFGESADGNDNICIQVIHNILDIEKILAEYITNAAYAVNNISGLDKDIIGFGKFSTVYTYDEFKDPEHHRAAFNNNDKLINAIKAQYDEFDNFLDNPRLGYFGQAFFSKEGRNYIINYGNECYDILALLSGLAHWVVANNEEESRISRTWLYNLDKNLDNEYISTLNYLYDRITNELTNSFSKNSAANVNYIAETLGINPAEFAEQYFRFSIMKEQKNLGFNITKLREVMLD

SEQ ID NO: 163 - protein, 1421 aa, Artificial
  Synthetic NLS-dCasRx(1-338)-GS-Xten-ADAR2dd (E488Q)-Xten-GS-dCasRx(339-972)-NLS
MSPKKKRKVEASIEKKKSFAKGMGVKSTLVSGSKVYMTTFAEGSDARLEKIVEGDSIRSVNEGEAFSAEMADKNAGYKIGNAKFSHPKGYAVVANNPLYTGPVQQDMLGLKETLEKRYFGESADGNDNICIQVIHNILDIEKILAEYITNAAYAVNNISGLDKDIIGFGKFSTVYTYDEFKDPEHHRAAFNNNDKLINAIKAQYDEFDNFLDNPRLGYFGQAFFSKEGRNYIINYGNECYDILALLSGLAHWVVANNEEESRISRTWLYNLDKNLDNEYISTLNYLYDRITNELTNSFSKNSAANVNYIAETLGINPAEFAEQYFRFSIMKEQKNLGFNITKLREVMLDSGGSSGGSSGSETPGTSESATPESQLHLPQVLADAVSRLVLGKFGDLTDNFSSPHARRKVLAGVVMTTGTDVKDAKVISVSTGTKCINGEYMSDRGLALNDCHAEIISRRSLLRFLYTQLELYLNNKDDQKRSIFQKSERGGFRLKENVQFHLYISTSPCGDARIFSPHEPILEEPADRHPNRKARGQLRTKIESGQGTIPVRSNASIQTWDGVLQGERLLTMSCSDKIARWNVVGIQGSLLSIFVEPIYFSSIILGSLYHGDHLSRAMYQRISNIEDLPPLYTLNKPLLSGISNAEARQPGKAPNFSVNWTVGDSAIEVINATTGKDELGRASRLCKHALYCRWMRVHGKVPSHLLRSKITKPNVYHESKLAAKEYQAAKARLFTAFIKAGLGAWVEKPTEQDQFSLTSGSETPGTSESATPESSGGSSGGSRKDMSEIRKNHKVFDSIRTKVYTMMDFVIYRYYIEEDAKVAAANKSLPDNEKSLSEKDIFVINLRGSFNDDQKDALYYDEANRIWRKLENIMHNIKEFRGNKTREYKKKDAPRLPRILPAGRDVSAFSKLMYALTMFLDGKEINDLLTTLINKFDNIQSFLKVMPLIGVNAKFVEEYAFFKDSAKIADELRLIKSFARMGEPIADARRAMYIDAIRILGTNLSYDELKALADTFSLDENGNKLKKGKHGMRNFIINNVISNKRFHYLIRYGDPAHLHEIAKNEAVVKFVLGRIADIQKKQGQNGKNQIDRYYETCIGKDKGKSVSEKVDALTKIITGMNYDQFDKKRSVIEDTGRENAEREKFKKIISLYLTVIYHILKNIVNINARYVIGFHCVERDAQLYKEKGYDINLKKLEEKGFSSVTKLCAGIDETAPDKRKDVEKEMAERAKESIDSLESANPKLYANYIKYSDEKKAEEFTRQINREKAKTALNAYLRNTKWNVIIREDLLRIDNKTCTLFANKAVALEVARYVHAYINDIAEVNSYFQLYHYIMQRIIMNERYEKSSGKVSEYFDAVNDEKKYNDRLLKLLCVPFGYCIPRFKNLSIEALFDRNEAAKFDKEKKKVSGNSGSGPKKKRKV

SEQ ID NO: 164 - protein, 310 aa, Artificial
  Synthetic Renilla Luciferase W60X
MASKVYDPEQRKRMITGPQWWARCKQMNVLDSFINYYDSEKHAENAVIFLHGNAASSYLRHVVPHIEPVARCIIPDLIGMGKSGKSGNGSYRLLDHYKYLTAWFELLNLPKKIIFVGHDWGACLAFHYSYEHQDKIKAIVHAESVVDVIESWDEWPDIEEDIALIKSEEGEKMVLENNFFVETMLPSKIMRKLEPEEFAAYLEPFKEKGEVRRPTLSWPREIPLVKGGKPDVVQIVRNYNAYLRASDDLPKMFIESDPGFFSNAIVEGAKKFPNTEFVKVKGLHFSQEDAPDEMGKYIKSFVERVLKNEQ

SEQ ID NO: 165 - protein, 310 aa, Artificial
  Synthetic Renilla Luciferase W104X
MASKVYDPEQRKRMITGPQWWARCKQMNVLDSFINYYDSEKHAENAVIFLHGNAASSYLWRHVVPHIEPVARCIIPDLIGMGKSGKSGNGSYRLLDHYKYLTAFELLNLPKKIIFVGHDWGACLAFHYSYEHQDKIKAIVHAESVVDVIESWDEWPDIEEDIALIKSEEGEKMVLENNFFVETMLPSKIMRKLEPEEFAAYLEPFKEKGEVRRPTLSWPREIPLVKGGKPDVVQIVRNYNAYLRASDDLPKMFIESDPGFFSNAIVEGAKKFPNTEFVKVKGLHFSQEDAPDEMGKYIKSFVERVLKNEQ

SEQ ID NO: 166 - protein, 310 aa, Artificial
  Synthetic Renilla Luciferase W153X
MASKVYDPEQRKRMITGPQWWARCKQMNVLDSFINYYDSEKHAENAVIFLHGNAASSYLWRHVVPHIEPVARCIIPDLIGMGKSGKSGNGSYRLLDHYKYLTAWFELLNLPKKIIFVGHDWGACLAFHYSYEHQDKIKAIVHAESVVDVIESDEWPDIEEDIALIKSEEGEKMVLENNFFVETMLPSKIMRKLEPEEFAAYLEPFKEKGEVRRPTLSWPREIPLVKGGKPDVVQIVRNYNAYLRASDDLPKMFIESDPGFFSNAIVEGAKKFPNTEFVKVKGLHFSQEDAPDEMGKYIKSFVERVLKNEQ

SEQ ID NO: 167 - protein, 310 aa, Artificial
  Synthetic Renilla Luciferase W219X
MASKVYDPEQRKRMITGPQWWARCKQMNVLDSFINYYDSEKHAENAVIFLHGNAASSYLWRHVVPHIEPVARCIIPDLIGMGKSGKSGNGSYRLLDHYKYLTAWFELLNLPKKIIFVGHDWGACLAFHYSYEHQDKIKAIVHAESVVDVIESWDEWPDIEEDIALIKSEEGEKMVLENNFFVETMLPSKIMRKLEPEEFAAYLEPFKEKGEVRRPTLSPREIPLVKGGKPDVVQIVRNYNAYLRASDDLPKMFIESDPGFFSNAIVEGAKKFPNTEFVKVKGLHFSQEDAPDEMGKYIKSFVERVLKNEQ

SEQ ID NO: 168 - DNA, 18 bp, Artificial
  Primer sequence
  misc_feature (15)..(18): n is a, c, g, or t
gcgttatcgaggtcnnnn

SEQ ID NO: 169 - DNA, 15 bp, Artificial
  Primer sequence
gtgctcttccgatct

SEQ ID NO: 170 - DNA, 52 bp, Artificial
  primer sequence
aatgatacggcgaccaccgagatctacaccctacacgagcgttatcgaggtc

SEQ ID NO: 171 - DNA, 68 bp, Artificial
  primer sequence
  misc_feature (25)..(34): n is a, c, g, or t
caagcagaagacggcatacgagatnnnnnnnnnngtgactggagttcagacgtgtgctcttccgatct

SEQ ID NO: 172 - RNA, 26 nt, Artificial
  Non-targeting gRNA
ugaugcuuuuccuagauuauucucug

SEQ ID NO: 173 - RNA, 26 nt, Artificial
  Synthetic gRNA
cagagaauaauccaggaaaagcauca

SEQ ID NO: 174 - RNA, 26 nt, Artificial
  Synthetic gRNA
cagagaagaauccaggaaaagcauca

SEQ ID NO: 175 - RNA, 28 nt, Artificial
  Synthetic gRNA
cagagaagaauccaggaaaagcaucacc

SEQ ID NO: 176 - RNA, 28 nt, Artificial
  Non-targeting gRNA
ggugaugcuuuuccuagauuauucucug

SEQ ID NO: 177 - RNA, 25 nt, Artificial
  target sequence fragment
gcgacacggugcccaagccuccccu

SEQ ID NO: 178 - RNA, 26 nt, Artificial
  target sequence fragment
gcuugggaccuggggaagggcgacuu

SEQ ID NO: 179 - RNA, 25 nt, Artificial
  target sequence fragment
aagacauuuuuggacaaguuuaacc

SEQ ID NO: 180 - RNA, 26 nt, Artificial
  target sequence fragment
ucuugccagggugacaguggagggcc

SEQ ID NO: 181 - RNA, 26 nt, Artificial
  target sequence fragment
agguggccaccuucaaggguuggaug

SEQ ID NO: 182 - RNA, 26 nt, Artificial
  target sequence fragment
agaaccucaaugaccaccuggccucc
